United States Patent Application Publication US 2019/0183130 A1 - sequence listing, part 4

SEQ ID NO: 1 - DNA, 19352526 bp, Cryptococcus macerans (residues 5,805,760-7,741,012 of 19,352,526)
ctcgcccatgcccatgccgaggccgatcgcggccttactcgggccctcgctggcggcggccgccttgttcgacttcttgtgctgctccttctcgtccatcccggcctgcatgtcctcgagtgccttcttgaagtcgttcagcccgccaccggccgagccgccacgctcctccatcagctcgagtgcgcgcagccggagccggcggtccttgtcgtcttcgccgaacagccggatcggctggcccttctgccgcagacgccggacggcctcggccggcgagatattgaacgcctcgggccgggctgccgccgtcgtcgtcgaagaggacgcgatgagctcggtcgcggcctcctcgtcggcaccgccggtcgccgcgtcaaccgctgccggcgccttgctcggatcgggtgaccgagccttggtcggagggaacgacaggagcgactgaaagcaggatgcggaccagaatgtcagtctgcgagcatgcgacagacctcggacagcctggcagaggccaggacgagacggagggacaggcagggcgggctcaccttcttagccttggggtcgcgcgcgagcttggctgcgagcgcaatctgttcgtctcggctcgtctgctttcgggcctcggccttcttgcggtcatcctcggcctcgttgagcttgcgctgacgctcgagctcgccctttgacatgtacttcttgcgcggcgcggcggtcgaggacgacgacgaggcggaggccgggtcgggcccgtccgtagacgccttgcgcttgaggttggcgatttcctgggcgaggtagtccatctttcgagagcggagacggatgccggagtggagagaggggtcagagacgagggtcctgcttgggttgggtcctggagtgagacggagcgggaggcgagagcagggtcagaagggcgggtgggcgtcgggagcaggctgtcggtcgttccggcgctcccgacgaactcgcctccggtacgtcctcgtcgagcagcggctttcgtccatcgtcgcccatgagaccgagcgagagtagcaagcgagggtagccttccgtgaatagagcgcttctaggctacacaaagaagtcatcgtctctcagtcctgcagaccgacgtcctgcacgcggcctctccatcgccctgaactcccgctcgactgggttcctctggtgacggttgcaaaacccaaaggctcccctccacccctgcctactcgaccgcctccagccagagaggcagaggctggcgccgggcaagcttcaagcacaacggctggcccgtcttagtaggcgtcgccctcggcgttgtcggtcgagaagccctcgttgtggaggacgcggtccttgatgacctgaagccgcgctttcttgtcctgtaggaacggttacaagggcggagacacagtcagccgcggccctcacaacggggagcggacgtgagaggaacggacgtcgtcctccttccgcgcccggagcacctgcggtatgggtgcaggaataagcgggatcggaggctcgtcctcgacgtccagatcctgtgggagtgacggtcgacatcaagtcagtcaggaaccctaccaaaagtagagcgagcgcttgacagcggacgcaccacctcgccgatgaggacgacattctcgccccggacgagaaagacgccgcgcgggatgtcggcaaacgttgccgtcggcggatgaaagacgcgctcgtacgactcggacagaacgaggttggctacgatggcgcaccgggaagcgtgagttagtcgaggactccggcgtcgacggccttgggcgcctagccgcaagatcgctcgaataggtagggagaggacgcaccaaactggtcgtacgaccggaggacgccgacatacttccgaccgtcacgcaggaggacgagcatcttctctgctcggaggcgacggcagccggacagacgacagatggcgcggcgggagcgagctaggtcagctgcgtgctcggcgagggtccccccttcaaaccgcctcaggctgccattgctgaggctagaccgccaaggcaagcggccggacgcactatcgacgcagtccacgagtgagccggacgtcgtaaacggtatcagagagttgagcgagttcatcgcaagcgtcgaagggaggggtcgaggaggctgcctgtcggcgcggggcgaggggccggagggagctcgttcagcccaggttggagctgggtgctgggagacggttgatgggcgtgggccgagatggaagctgcagcagtgggagacgaccgaggtcgggcaggcagagggtagctgaagtcgagttaggtgaggaggtggttgaggcggcgagctcaagtcgggttgctggtctcggctgggcggcgcgacacgacggcgcgacacgagctcaacgagagctcaagggcggactggctcaaggctgacggctgaccccaagcgtcgccgagcgatgtcttccagggtcgacgacagcatactcatccgtcacgagcagagcagagaaggcgatcttgtcgagcgagaatgagaagacagctgactcgacctgaccggcacgggctcgacagccgacggacggagttttgggaagcacaacaatggatctgggcgagcagctacaaaggagagaggaacaaggacggtctgtcgagctagattttgagacccccagggtcaggtcgccccagacgcctcacccaatctgctgcatcagtctccttccgagcttacggccggcaacttcacaagccgctcgtccctccgtagggggagtgcagcttttgcgacggtgctttctgcagatgagagaagaagaaagggtcagcggcagctcgtataaaccaggagaaagcagcagcagcgacggactatgtcggaagttgatctccttagagatcgcgttaggggtcaggaagccggtgctttcagctgggcctttttgtgtcggccgctcgggccccaagttgcaagtgcgagtgcgaaagatttgggcgcgcccgcgcaggggcgagaaagcgtcggctgcgcgcgcccgccagagcaggcctcggagggacgagagcgtcggtcgcagcctgtccacactctccgccccttcctttaccctttaccccctaagatgagcacgacccttccgctcttctgggacctctcggcggcgtccaagcagaagcggcttaaggcctcgtccgagctcatcaccgcgctcgagcgcttccagctcggcttcgaggctcagcccgtgccgccggcgaccgacgacgacgatgccgccatgaccgacggtgctgctcgggccgcctcggctactgctgcaggctcggacgacgacgatgacgatgaggacgagtcgggcgaggaggtcgacgacagcgacgacgaggccgaggaggagcacgaggtcgacccaaaggtggcccggaggctcgaccgagagctcgacaggcagaactcggaggacgttcgctactcgattcgccgactcgtccgtggtctggccagttcgcgcgagagcagcagactgggctttgccgtcgccttgaccgaggtccgtggcctttcatctctacagagcgtctgagcgcagctccggagcgttacgaagccaggtgccggatgagactgacgctttctctctctctccggccccgctcgtccatcctcgacttgcctcgcacagctcctgtcccggctcgacacgatcaccccgcagcagatcatctcgatcgtccttcgcttctcccacatcaccgtctcgatccagcgtcaggaggtccgggacctactctttgcccggctctttggcctaacggccgtcgtcgagtcgggcctcctcttccggccgagcgcgacgcttgtcgatttccagacggccgtcggtcagctgaccaccgtcggcagccagaagagctggctccgcgagagctgttggtgggctgtccttggcgctgtcaacggcctcgctgccaacgacgtcgcctgggccgcggatggcgttcgctggctcgcagagtttgtcttcaacggcgaggagggcaaggagtggacggccgaaaaggtggcgctcgccgtcaagatgcagcaggcgtacccggtgcgttcctgagcgagatcgtcgcttggcaacaccccgtcctgattgtctcgctcttgctgctgctcagacgctcgcttggaagtcactcctcgcgccaacattcaagcacgcctcggtccttcacccgaccaacctgccgactctcgccaagatcctccgcgacacggccgtcacctccgaggaggaggatgacgacgacgagccgaccgccggcccttcggccaaccctggcacgggctcctggaagcccaacccgcccttcgtctgggacctcatccttgacgtctactttccgcccggcgccgactcgtcggcaccgacggccgcaaaagatcgggccgccttctccgacttctaccgtgttgccgtcgatggtgcgtttcagttgacgctcgcactgcgtcgcgcaactggctacgactgaccctcctctgatgacccgccctggtagagtcgctctttgacgtcaaggcctcgcctgaacgcaagtactggggcttccagatcttcatcaaggctctccctcggctgccggcgagcgagatgccgctcgtctttacgcccaactttatgcgcgtctggattaacaacctcggcggcgaggagcgctacctgcacaaggcggcgctcgcgatcgcccagctcgtccagacggtgacggccgacaacccgacagcgggcttcaccctcctctcgcagctgctcggcaagaatggccatcgcaactttgaccgggtgacaaagaccaagacggtctcgggcattatggcttcgctcagcgccgagggcgtctcggactttgtcgcctacctccagggcctgctcaacgaggctccggctgccacctcgaccgagtgcgtccgcaatccgggctgcgcgaccctcgggcgacagtgctgacgcttcatgttcgatctcctcaggttcgaccacaagcaggtcgacgcacggaggacgtggatctttgaccagctcgttagcctcatcaagaacacgaccgtccccaagaccgacacctgggtctcggccgtcctcgagttctttgtcgtccacggtctctttgttgtcaaggctgccaacaaaaagagctcgctcacgactgtgcgtcattgcgccggctcaacgactgcggctgccgcacatactgatccttgctcctttcgcagctccacactgtccctcacccggctctgtcggacgctgttcacgcatcgtcgcggacgcgtctgtcgactatccttggcgagctctcgacagagtcgacgctcatcaagggccccgacggcaagcagaagcgcgcggtcggctgcgactcgaccggcacgctctggacgagccgcgcgctcgcgatcgttagccagctcgacaaggaccggaagcacgtctcgcccgcgaccgaggaggacgccgacgttgccgctgcccggcaaggcgcccacgccgtcctcgcgacgctcgacaaggcgccggccacgaagcgcgaggcggcccggggcctccagctgcttatccagtcagtcatcctccagtcgtacgacgacgccgaggcctcgctcgacgtgctcgaggagctcgagtcgtgcgcgacccgcatgtttgccgagaagctcaaggcctccaagaagcagaaggctgccgcggccgaggaggtcgacgacgaggaggaggacctcgcgccgatcgacatcctcgtcgacgttctgattggcttcctcgagaagtcgtcgtcgcagctccgggcgctcgccagccaggtctttggcgtcctttcgggcgaggcgaccgagagcacgatcgacctgctgcttgctgtacgtctttcctctcgactgtcattttcaaccggacgacgctgacgccttcactcaacttccgtcctcgcagcaactcgagtcgcgccctgtcatgacaggcgacgacgacaacgagggagagccgatcggctcggacgaggagatggacgacgacgaggatgatgaggacgaggatgccgagtcggacgacgacgaggactcgggcctcgacgaggaggatgccgaggccgaggtcgacccggagctccggaagcggatcgccgaggtccttcaggtcaacggcgcggccgagggcgacgccgacgacgacagcgagtccgaggaggagtcgctcatgggcgacgacgagatgatggcgatggacgagaagctcgtcgagatcttccgcctccggaccgaggagaagaagggccgcaagggtgcgtccgatctcggtccgccttcttcgccgcctgccactgacagtcgcctgcccccgactcagacgcccagcgggaggcgacgcacttcaagaaccgggttcttgagctcgtcgagaccttcctcaagaagcagccgacgagcccgctcgtccttcgcctcgtcctgccgctgctcgagctcgtccttcacggcagcccgaccgaggctcacctgacgtccaaggtgacgggcatccttcagagccggatgttcaaagccaaggagccgctggagattgtcgaccgggccgaggctgtcgaggttctcaacgcgcttcacaccgaggctcgcgtcgcgtcgagtgcgcagacggccaagctctgcagccaggccatcctctatgtctcgcgcgcgcttctccacgaccgcctggcggcgtcctcgtccgccggccaggacttgtctgagccgatcgtcgcggcctacacgacttcgctcgacgactttatgaccaagaagtcaaccaaggtccgggcctcgctcttttctgacctcgcgacgcgcttcccggtcgtcgcctggtcgcttcggagcgcgctcgtccagtacgcccaatcggagggcgccaactcgtaccgccagacgcaggccttcaacatcctcaacgacctcatctcgcagctgccggcgctctctaaggccgggctcggggccgagatccgcgagtttgtcccggcctgccgagcggccgtctatacgattctcgaggcggccggcagtggcgacgtcaacgcggccaagggcctcaaggccgaccggctgcgcgacattgtcaagtttgcgctcaagctcgcccggtcgagcaaggcggtcctgccggagcctgccgactttacgagcgcgtgggcggccgagagcctccctgcgctcgtcgccggcctcaagcagagcgagaagctcaagagttcaaagggcctgctgtcgagcgtcgaccagctcgctcagctcgtcaacgccccgccggctggcaaggccaagggtggcaagagtggtaagaaggcggcagcggccgacgcgacctcgtcggccaagccgaaggccgtcgccggcggtgagggcgcggcagcgaccgacggtctcgtgccgacaaaacgcaaaaaggcggcggcgcccgcggcggaggacggcgtgaagaaggccaagaagaagagcaagaaggcagagtaggagggagaggatcttctgcatgagggtttttcatcggagacgatcgcagctgggttcagccggccgcggaggctgcgaagcaccttgcacctcgttgcaggagaagtctaccatttaaggctgcgtcggaaggacaggccgcgacgaccgtggcgaggtgatgacgacgggctgggacgagagttttcgtggctgaaccctctctgttgctgcgcggccgccggtcggtctctgttaggcggcgcgcggcgacgatcagctcgactcctgacccgcccgacctcgtcctcctccctcctccattagccacctctctcagctcgcctttgacctcacctacgacctcattgcctcagtcgcagactctccgccgacgatgcctgcttcgactgtccagcagcagcgccgcccggcagctcagcagctggcgttcgtcgctccggcccctctctcccgcctcccgccagatgccaagcgtcggctcgcatccctcccacttctcccgctcgcactcgccgccctcgtcgccgtcatcccgacgccagtcgacgctgccctgtcgacgttccagatctcgacgccgcgccagtgtgcgccgctcacgctgaactggacgacgccaagcgggagcgtcgccggcgccgacgagcctttcaacctcgtcctcatcccgacgagcgatcagaacgaagtcctctcgaacctgaccttcacctcgaccgggaacaggtccgtcttcttttcgcccaacactgctctttgtcggaggtggtttggccgaggaggaaaaatacgaaagaggggtgctagcggccggtttaaaaggggtagaggttgcgcagccggcagcccatcaccctcgttccagtctgggaccccagaggaggcccgttgctgacctgccgctctctctccgccgtcagtcacacgatcccgagcctacctctcggtcgcaacaccgagttcatcgcgctgcttcaggacggcgacggcgcgtctggcgggcgcgtctcgcagatcgtccgcgtctctgacgagcaaggcggcggccgagactgccttgccaaccggccaaactacctcgatttcgtgcgtgcaacgcaccgccagtctcgcaggccttttcacgacagcgctgacgcgtcggcttgccttcggtcctcggcagacattttacgtcgacccgacgccgccgaccgtgtgccagccgctgaggatcggctgggatgcaaacgcgacggcgcccataggcatcaccggtgcgtcgtcaatatcatcagtctctcttctcagatcagcgagcgctgacgaccgactggacgctctgctgcaggaatgatccccggcggcgagagcttcgacattccggtgacgaacgccggctcgctcacggcagactggatcacgcgcatccctccaggaacgaatgtgctcttggccatgagtgacggcggcacccggtgcgtgcttcttttcaacttgaggcctttgtcgaagctgaccaaacctgcttgacctggcagcggctccggcggaagctcccccatctacaccgtcggcggaggcgacacgtcctgcctatcgggcgccggcctcgacaatgccgtcgtctactcgtcgctggcgctcgggcaggtcccgacgactctgacgtgagtgcccttgcacgacgtctgtcgccattggctgccatcctgccttcgctgaccgacgatttcggctcgaccagcgttactgtcaccgctcccggtggcgcgacgaccatcattcagtaccccggcggcgcgccgtccggaggcgtgtcggtcggtgacgccggcagctcaaagcccaatataggcgctgtgtgtctccctttcccctttgccacctccatctttcagtcttcgcttaccagcgcctctctctcggccggctgccgcctttgcagattgtcggaggagccgtcgctggcgtggctgctctggcgatcctcgctgcccttcttctactcctccgccggcgtcgccgccgagcagctgccgaggccgaaggtcctgaaatgacgacggccaaccggccttgggacccgcccgtgccgcgcgacccagacaccctgccgccctcgacggcgtctttcctcggcgggccgtttggctcgccgtcgatcggcaaccgaccgagcacagagtatggcgccgcaccgccaagcgccttctcgcacgtcccgcctggcgcgtacgggtcagccggctctgatgcccactcgacgacgtcgctcatggacgggaccgacggcggccggcggtcgactgagaagcgagcactcgctgctgctgctgctggcggcgctaccggtgcaagcagccaaggccgaccgtccgccgacgtacagcacagcgcagcgctggatcctcccccggcgctcggcagcggcgggcgcgagcgggccaactcggccggctcgggcgcgcgcttcatccggcacgaggacgccggcctcgtcgagagtgcggccggcgatcacaatggcgctgcagccgaggaagaagtcgtcgacttgccgccgctttaccaggatgcccggccgaagacgggcccgagcgctcggcctgccgggaagcctctttctcactctggcccgactgctgcaggccggacgagcggtgatgccgcatagaccgggtgcctcgtctcgcctgctcccactgcaatacacgtgcctctcatggaccattgctcttccactctcgctcgttagcctgtttccccgcctcgaaccatcgctttgtccgtccttcatcttcggatctgtacaaggccgcgcctcggtcgtcgtctatctgctcgcaggagtgatgtcgatgggcatttcgagtcgaatgagcgcatgcgatcggcaggagtctaatggcgctgccagctgctcatctggaggtctgaagcgacgagatgggggaaaaagggtcgtcaattcgcgatcgacatggcatgaaagagtgagagaggacgcaccgtcgtcttcagttccgcgggtgtcggcgctccctctccgactattgggtgcaggcggaagccggtcgaggattcggccaagcaggtcctccatccggcccatgcgcttctcgaccgcgcgcacgcgagctgccatctggctactgtcaacatctcctgtttcgagaacgtcgctcgccttgccgatcgcaaccgtcggcgaggctgggttgtctgcggtcgatgcaaggccgatcgcaatcggttgggacgagggtgactgagcaacggcggcaagggcctcctgggcctgcgcaagccgttgcgcgaggttggacgacgacggcgctggcagagactggccgccaaccagtgctgccgggccgtcggcggacccaggtcgcggcggagccggcgacggagaccgctcgaacgcgacgcgaccctcggggattgtcatcgtccgcggcagctgacgcccggcgccgccgcctccggtggactgagagaaggcccgccggtgggcgacgccctcgtgggccgagcttgatgcagctcgccggtggtgaatgccgcgtcctgaggcggacaaaaggtggcttggctgctggtgcgaggccgacagcttattgctgtagatctgggcgagcggcgagggctttgcccgcgagtaaccgtcgagtgagtcgagccgcttgcgcggcgagtgcgggatcccgaccgacggcgatgtcttgtcgaccgacggtgggaacgctacccgctgccgaggcgtctctgccccgctcccagctccggtcaacatcggattgccaccgacggccagcgtcggcggatgttcggtctggggagacatctgcgctggcgaagtcgtcccgggcgagaagaccggatggtcgagtatgctcatgtcggccggcttgccctcatcgccgagaccggcctcgatgtcgctgtccgccgagtcaaagccgtcggtgtcggtgtccgactcggaccagtcctggttgatctcgtcttcaatctcaaagacgttgctgatctcgctcgtcgagccgacaaggccctcgatcagggctgagtgagcaagggcaaatggcaaggtcagcgcggggagaggcggcttcgaaagcgacgtcgacgacgcacgaagcgattgtaggccgcgtggaagcgtctcgaaggcgtactcgaaccagtcgccgagcttggcgaccaggtgtgaccgctggacgacttgccgctcgtagaggctgcgggcggcaggtcaagaacgtcagtccgaggagacgaatggggaacagtcaagaggtcaggacgactgacgagatgcagatgaggatcgggaaagctgaagcgcggatcataagcacattgaccttgtggaaatagcgcgggccgagaaagagcttgagcgggaccataacgaggacagcaatcaggttgaacggtgcctggtacgagaagacggcgtccgacttgacgccttcgatcgtcgagacagccttgcggaacatggcctcggccgccgctaaagggaggagaggcgtcggccgtcagctcgacatctcggcctgtggggagctgagggcagacgaaccatcctgtgagatgtcggcgaacgtcttagagaggatcgcgaccaggaccgtcaagatgagcgtgttgctcaggcaggcgtaggttctggcgagcacagggcgttcagcgacgagattagttgcggaccgactgtcgcagagggcgacgacgcagactcacaccatgacgaccgggccgaagaagggatggaagttggtggcctgattaaaaccggaggcgtcgagctgagagaggtcaagaccaaggacgatcagattcagacatcttaggttccgacaggaacgagtggggacgcactccgaagaagatgtcgagcatccaccacgagacggtgccgatcggaatgctcttctccgacagcgtatagagcgcgtagaggaaccccaggaagctgcgaaggggacaagtcagtagagattgacctgcatgtgagtgagaagcaagcaagaacgtaccagaaggcgccaatcatcatgaggaaggcgaactcagcgaccatgctccgaagcgcgagaatcatgaggttgtcgctgcaacatatgtggaggaggcgtcagctgcagcaggcaggcgatcaagtaggcaacagccgccgcacctgagcgagacgaaggccagtcgagggaacatgacgcaggcgccgattgcgagcagatcaacgccgaggacggcggcccactcgcgcgactcgccgccgccgccgaggatgtgggcgagcccccaaccccggagggagaggtaagacaggtagatgacgacaaaggcgaggtcaaaactgcgggtgcgagggcggctctggtcagcaccccagggtcgaggctggcgtcgcaacggcgacacgcacccgttccaaaggttggccgagtagacctgcatgccgtgctcctgcgttgccgccaccttgtcgagcgagaagcctggcaggagaggcaaaggtcagccagatgcgcacttgtcgacgaggcgaaaaggagaagaccgaccagccgcatagacgatgaagccccactcccagacgttgacgcgttcgatttcgccgagctcgagcgtgagcacaaacaggccgaagaggatgaggaagctggcggacgcaagcgcaagggagtcagcaaagcgcgtgcgcttggggtcggagacgtgttggaaggttcgacttggtgagctcaaggacggctcgcacgcgagggaccctcagccggtaatggtcgagtagcggggccttgtgcgggttgtagagaccgatcggcttagtcttatagttctgatgagggcgaggcgagcaggatgtgtgtgagcgaccaatgcgaagcgcagggaaatagtgtgaacacacgtcggcgatgatggcgtggacggaggccgcctgatagatgacgcggcctgtccagatgccgttgatgacctgcaggaagggccgagccggaaaacttgagtcaggaaggtgaattggatccggatccgacgctacagcttctggccgcaccttctgacaacttggcgccttgatgaatcgcttgctcttgcttatgatcgccatctgaagcgatcggttcagcgcggagcgagagggtcagcgtcgggtcgaagcgagacggagaacaatccgactggtatgaaaggctctgcacccacctcgagcgcattaccaacccgctcaacgccctcttcgccctcgtcctcgagccgctggcgaacgacatccgaggcgccctggtagaggtcccaaggcgtgaggaggacgtgtgcgagctcgagcgttcgctcagaccaggcccggaggagccggatcgcgaggagctcgcagagcgctgcgcgcgagagtgagagaagggagagtgagagtgagatggatgagagacgaatgaattggaccctgtcaggcgggaggcagccagtcgtcagcctcgtcttgcctgactgcgcggctgcagcccggcgtcggtcgagccagcggtcgacgaaccgattgatgagcaggcagaagacttggcgcaggacagacgttagcctcgcaccggagacaaaggttggccgggaactgaccgacggcatggttgcgcttccctaggtacttctcggtcagcggccggacgacggtgtacgtcgtgtctggcgcatgtagctgctcccaggttaggggcgtgtctacaaaggaatcggtcgagcagtcagcaggatccattctgggcaacttgagtgaagtatcgtaccgatgtgggcctgcgaaagatgatgaataagcggtgagcggcgagccgaggaggcgaggcggggagagggagggcgtcaggcggcggatcatcgacggcgagctcgaccgacatcacagctcgcgacgcatggacggacgatgacatccttcctgatctgatggatcagcgggtcttgtcaagcgagaagcagacgtccaccagagaacagagcgagcgtcagcgccacaggttcagcttggccaaggaaggtcgaagcagcgaggggggcggcgcagccaccttccttcataggaggcgcgactcacagacgggcgtcgctgccaggagagcgctactcggccctggcgtacgctccgggtctgcaggtgtctgggtgcccggcgtcgtgggaagagcaggcatccgactgtgacgaggcgagtccgatggatagttcgtagaggcggtcaagggcgaactcgtcgagctcgctgcggttggtccccatcctccgaccgacaagtcctccgaccgacaagatcttggccgcccttctttcctgaccacaacggcgttcttatcacaacgctagctaggcggaccaaagccctcttgagcgtcgcctgttccgcgccaaccgagatcagtcccagagcccagctgccgccggagctcagggtgcattcgcatcactgtcgcctgcgcgcgccttgaccggccgagctgatacctttgcccctcgtccctcattctggcaaaggagccagcaggtctagcactcgcccacagaggaggccatgttcggacgagatgccctttccaagcttgccggctcgtcgtcggccggccgggacgacggcagcgccgctgggatccctggccaagccggagctggcgctggggccaaaggaggcagcaagctcgcggccatcttctcagctggcggcgggagctcgaccagtacgttcgcagagctcagctagtgcgttggagagatcagcgactgatcgcaagcgtgagctcctcaccagacccggccagctcacgcaaaccgtcaaagccagagcgtcaagtgctccggccgcctgcgtcgaaccctccggtgcagtacctcacgccagagatcatctaccgccaccaggctgctcggtccgcgtcgtacgggcaggcaattagcccgggagctcgaccgcgtgcaggaggtcctcgcccgtccgacgcaccgccgcgggcaaggcggaacgactggccgaccgctgtcgacgacgcaccgccgcagcccttcgacgacgacgtcgagtacgagcggcagcgcatcttggccgccaccggcgaatggggccatcggcatgcaagctcgctcgacggcacgctcacgggctcgctaccgacgaggacaagcagccggggagtcacgctcgaccggcttgacacgggcgccccgactccgcagcagccgcgccgacccgacggccagggaagcatgaccaagtcgggctcgctgccttccctcctctcctcctcctcctctgcgccgccctcgcccaattctttatcgtcagctctaccggcacgcgtcgactcgccggaacccctcgctcggccatcgccgacactggctcgcccggctttgccgagccattcctcctcggcctcctcggccgcttgggaggccctcctgtcacggacggcgggcatgtcgctcccagccgcctcgccacccctgttgacagcggtagctcactccaagccgccagtgccgctcaagacgcagccaacgctctcagcccaagcatctccgagcgtcccagagccgcaagtcgctgcctcgtcgcgggcagcgccagacaccccgaaccatacgcctcgaggaccgaacaagcagactcgaccggctcggcccacagcacaggctgccgactggggcaacctgctgtcgaggacgtcgggtgccgcgccaagctcgattcttggacccccgagcttccaggtgccctcaaccgtatcgaccgtgacccgaacagctcctaccgaacctgcgccgccagtctcacgcgctcctgagcactctggaagtggtagtggcagcggcggttgggaagctctccttgcgagaacgcaaggtgccagccccgggacggccgccctgacgacctcgtcgtcgccaagccctggcgcccgagtcgccgcactcttcaagtctgccaagccgagcatcgctcgcaatccttcatcacccgatgaaccggcaacagcgatgccaatgcagaccccgtcactcgtgttcgacccgccggcagcgcctgccctgacacggccgaggcatcggtcgccctcgccttcgagccgtatccccatcagtacaccgccgcttcaggtctcttcctctcccccgcctctgccgccaaagtcacgagaactgccgcccgaccgaccgacgccgcgcacgcgacgagcggcgcccagccggcccggcagcacaccctccccaggcatgtcgactccgaacctgctgtcgaaacgcgagacgcgaccgctggtccagcccattgcaaagccttccattggcatcacgggcctcgttcgggcaccggatggcgagcgtgggccgcgagccaaggccgagatggtgcgtcaacgtgcctccgccgtgcgctgttagaaggctgacactgatgcactctcacacgcatgccagttgacgtcgccgtgcatctgttgcgcagcaacgctccaatacccaaaggggatcgtctcgtttcgttgcacggtgggtcgctcgggtcgctcgagagcgcctttctgttcagcctgcctaattgacgcaccacttcccttcgtccaggtctgtgggacggtcaccgacgtaaatctgagtgaccggcgagcggctggcctcggcaaatcgaccgatcctcagccactcaccctcgcccgcttcgagctgctgcttgacgaggcccgggcggcaaagtcaccggcgccgtcgatctgctctgcacggcgcaacagccaggacgaggacgtcgccgacgctcggacgcttgagggcgacagtaccgacgaggaggaagggaacggcctgacgagcgcggccaccctctcgctctatggcaagagcaattggttcgacgcgcttgaggacgagctctttgcgtgcgtctacgctgcgttgcgtgatgaaagcgcgttacgagtcggctgacactcttatccactttctctgctcagcgtcttctcccactggtccagcctctgcggcagcttcagcaacgtgcgtcaatcgtggtgcactgaccccatgccttggctgactcgtgccgagtcgccctcttgcacagggccgagagccatcttggtccgagccaggcatcgacgtcgacgaagtccagcgcttctacctcttgctcgcgacactcccctcagagctcggctttgccgtcgtccgcggcctcgaggggctcctccggcggccgaaacgccgctttgacatggcgccggctggtctcgcttgggtgctcatcgtgctcgagaacccggcgctgttcaagccagggtcggcaagcagtcagtcgagcggctcggtgctgaagcgctttcttgggatcgtcagcaacctgccgaacgaggcgcaccactacgtccgtctctcctgccttccgtcttcacggtcgaggcccgctcaccgatcgtcctccttcctgatctttgtctgctcagctcgtcggctggctcgacgcttttgacatggaccgcttcgagcgcaaaattgagctcatcaacatcgccctcgtcccgcggatccgcaagcacgccctctcagtcgtggcgcctgcaaaccgtaagggcgatctgccgtcctactcccacgactggcgcttccgctcggccgctcgcgtcctctcgctcttctacgcgtcaaacgtgcaccgcgctcggctgcccgtctcggccttctatgtgacgttcgccgaccagctcgacgctgtcctcgactatgagagtaagttgcgcgaccgatgcctgcgttgtggagagcctagcgctaacctcgcacactgatctgtcgcccctcggccagcttggatccggacggcacacaagaagtcgaagagtgccttctttctcgctcagtaccccttcctgctgtcactcggcgccaaggtcaaggtcctcgtccacgactcgaagcgccagcagaacgagcaggccgggacgtcctacgtcggccttgacggccggaggaccgtccagcccttcatcacgatccggatccggcgcgagcggctgattgaggactcgctcgcgcagatatcgagctcgctcgatcatctgaagcgggccctccggatcgagttcacgggcgaggtgcgtccctccttggcaagtcagagacctccttgatcaggctgaccggccatctgctgcaggagggtgtcgatgccggcggcctcaagaaggagtggttcttgctcttatgccgcgagctttttgggacgttcggcgtggggaccggcatgtgggttcaggacgaggagagcaacctgtgctatttccacccggcgtcgtttgaggcagacgagcagtacacgcttgtcggcgtcattgtcggtctggctgtgagttggccgcgctctgctcctcagcaacgtactgatgagcgtcctcactggtgccgccagctctatcacgccactgcgctcgacatcccgttgccgacggcggcctttaagcggctgctcgacaagccggtcggactcgccgacctcgccctgctccgaccgtcgctcgccaagggcctacaggatctcctggactttgagggtgatgttgagcagacgttctgccggtcgttcgtcggcgaggtgagcagcgcgcagaggctcgttgtgtgagcagctggatctgacgcacatccgctctacctcaagtacgagtccttcggcgaggtcgtctcgatcccgctcatccccggcggcgatgacatcccggtgacggcctcgaaccggcaagagtttgtcgaccggctcgtccaattccacctggtccagagcgtcgcccgccagttccgtgcgttccagcgcggctggctctcggtcgtcgagggcaacgcgctgtcaatcttctcgcccgacgagattgagctctgcgtccgcggctcacccgaaccgctcgacgttgcccaactgcggatggtgacgcggtatgacggctgcagcgagaacgagccgctcatcaggtgcatccaggagtgtttctcgttcgacctcttgaagaacactgaccgccgcctgctctgtcttcgcccagcgccttctgggagatcgtcgagaacttcactctcgaccgccaacgccggctgctcgcctttgtcactggctcggacaggatcccggctcagggcctcgcgaacctcgagttccggatccaggtgacgcgtgcgccgccgagccatttgccctgtgcgtgccctccccctcttcctgcctgccacctggctctcgctgactcgatagacactccccgcagcgagccacacgtgcttcaacacgctggccctgccgcgatacccctcgaggtcggtgctcgagcgcaagcttgtcgacgccatagaagagtcggccggcttcggcctcaagtagagcttgcgcgcgggccccattagatgcgactgttcctttcacgccgatctgcgcgcgagcaggcctcgagcgagatgtaggatgtgaaaggggagaagtctcgaccttgttcggtcggtcggcccttattcgctcttgctctcgcggttggcccgcgcagcaggctcagccctccccggccgacgatcgacttcgccctcggagcttgggcagctgctgtctctcgctgcgaacctcctcacctcctcctcctacttgcgtcgccgcatcctccatcccactgccgcttccctcctcagcacatgcagcaccttctctccaccgccctgagcgatcggcagccctcgtcgccccgcctcgcgcgcctgccctcgactagctccaacgacaacagcggcgtcagtcccttcccgccgtcctcggcccggagcaagggcaagcgacgagcgcccttgccctgggacctcgatgacagcgacagtgactctgggcgccgaggaccgacaaggaaacaccgccggtgcgacggctcgcccggcttcggctgcagcagcggcagcccccgcgctagctcgctcacctggacgactggcccgagcgagatgacgggcccgccgccagcgtcagtcggctcgagcccagtcgcagcttcaggcaacgccttcggtctcgtcagtattgcttgctcgacctgttgcccttcctctgagactgacggcatcatccgacccatcctgcagcggtcgatgagccgcctgccgtcacgcccggccccactctcgctcccagcccgaccgacgtcgctcttccgccgggcgacgtccgacccaccgccgtgcagcccgacgaccttccacgtccggcacgacccatgctttgacacgctcaacgacgccctctgccgcgcccaggaggccttcgtccagggcttcgctgacgcccagtcgtcgcagcacgcgtcggcgcccctgccgctgccgccggccccgccaacgtcaccctcgtgggagatggccgagctctcgccgatgatggtcacctacgacctactgtcgtcgccgtttgagatgcccgacctctcgcccgaccgggcctcgtcggtcccctcggagcgctcgccctgcgccatcccgcgcgcaggcgacgacctcgacggcgtgcccgacctctacgcctcgtcgtccgagacctcagccgcgtcgtggttcaccggctcgcgcttcgccgccgacgtcgcagagagcgacgacgatgacgacgacgctgacatcatcatcgacccgcgccggcactcggtcgacgacctgtgcgtcacaagcgtcacttcggccaggcgttctgctaggttccgatggctgactcccttcgccacttcgcgatccctcctcctaccccagatcctatctcctcgtcaagaccgacatctgccggccaacaatctcgcggcgcggcgctttctggggcgacgccgccggcctcagtagcctgccgatggccggccactccgtctcgcgctcgagcagcgacgacctcggcctcaagtttgattgaatcttctccctactcgacacctaagtctcatcaccgtctgtcacgtctcccgttcgattgactctatcgcgccttgtaagggctctccccttgccctcgtccaccccgcgccctgtccgtagacctgcttttctcggcctctcatctttgtacaccgccactataaacgctgtttgcctgctgatcgtacgcactgggatccgtgcctgccccaagagtcctggtggtgactcgtgacccgtcatgcatctccggccgcagctctcttcgaccgagtcctcctgccagtctctaacggcgcctcttcggccagcccgacgtccgactttcgcttgcctttcttgacggtggtggccgcatctccacaggccgagcctgcgctgtccagctcgagccccaacgtcctggccgtctcctggatccagatgcggcgctcccactcgcgctgttttccctcgtctgtcgcctcccggacgcgctcgagaaactcgcggtactccgattcgttgtacttgagacctttgcgccctgctgccggccggagagctacgacggctgcctcgtccgagaagaacgggaccgacggcgagaagagggagagcacgagcgaggccgtcgctggaccgaccccgcgaagaacggtgagcgccttcagggcgtcgacgacgactgcatccgcagccgatccagcctcgctcagcagcttaaacgcctcggtcgaggcagcgacgacggcctggttgtcgagagcgccgatcattcctcggagggccggccggttctggccgaaggcgagcttgaagtcaagcacctgcgccagctcgggctggctaaggtgcggcggcttgcgctcaagtatgcgagaggggagatccgtccaggccgtcgtgtaaagctcggagagcgtgggtcccttttttgttgccggtagggcctcgaggatcgcctggaggtgggccggcgaagggcaggctcggagcggagacatcgccctcttgatcgggtcctgcgttagcggtcaagcctgaacaagatcagcagctcatgactgaccttcaacaagtgaccgtgagcgttcgcaggcgggaaaggactggaggagggccgttgattgaattgggtgtcgggcggaggaggccggccggttttgctgcgcgtcgaggggccgggacaggcggcagcctcgagaacctggctcgactgccctcgttctcacatgactggccatgcgagtcaaggcatctatcagggagcggaatggtagcgctcgcacgagccgacaggggaattgtagctggcggagggaggcttgcgagttgccgactgcacctcttgcagctgggcgacctgcgcgcccgcctgccactgacgctcacccgaatctcaccccgtccgccagccgagcctctcctctcgctcgccatcgcacccagggtccgaactgtcatggtccagtcgcacaagaaggtcaagaagagcccgttgccgtctccaggtacgtctctcctccaggaggacgggccaggtgccaactcgctcctccttgctgacgacccttcttgctcctttcctttgcctcactcgcccccgtgcagaccggccgctgatctgcctcggtctcgagggctcggccaacaagctcggcgctggcgtcctctgccaccatccgaatggccagacgacggtcctctctaacgtccggcatacctacattaccccgcccggcgagggcttccagccgaccgacacggcccggcaccaccgcgagtgggccgtcagcgtcgtccgggacgccatgctcggcgccggtatcggctgggataaggtcaacgtcattgcgtatacgaagggtgcgtcctgcgacggccgaagcggcttcctccgtgagccgtgagtagcttcccgccgaccgactgacgccccttgtacccgatccaggtcccggcatgggagcaccgctccaggtcttctccctcgttgcgcggacgctgtcgctcctgcacaacatccctctgatcggcgtcaaccactgcgtcgcccgtgggttcagccctagcctcgcgaaccgcagccctgcagctgacaacctcggcccctcgaccgaccctcgcgcagacatcgaaattgcccggctcatcacgtcgtcgccaaacccgatcgtcctatacgtctcgggcggcaacacgcaggtgattgcctactcgcagcagcgctaccgcatctttggcgagacgctcgacattgccgtcggcaactgcctcgaccgctttgcgcggaccgtcggcctctcgaacgacccgagcccgggctacaatatcgagaaggaggcgcgcaagggcgagcggctcctcccgctgccgtacgcgacaaaggggatggacctgacgctttcgggcgtcctgacggccgtcgaggcctacacgctcctgcccaacttccagccgggcgagacggcagacgccgccaacccgagcaccaagccccaaatgtcgtcgctcaagtcggtcctcgccatgccgtcgtttgacggccggcgagccgacgagggcgtcatcacgccggccgacctctgcttcagcctgcaagagtgcatctttgggatgcttgtcgagatcaccgagcgagcgatggcccacgtcggcggcaagcggggcgaggtcctcatcgtcggcggcgtcggctgcaacctgcgcctgcaggagatgatgggcatcatggcggccgagcgcggcggcaagctttacgcgacggacgagcggtgcgttcccggtcaggcgggccaggaccttggccaaccctctgactctgaaactcccgcagattctgtatcgacaacggcctgatgatcgcccaggccggtctgctccagtaccggatgggccagcgcacggcgctcgagcagacgacgacgacccagcgcttcaggaccgaccaggtcgaggtcacttggcgcaactgagcagccgctttgaaagcaggggggtcttttgccaggagctcgccacgcgcgtcttggtcggccacccggcggctcgtcgcaagggacaagctcaaacgcgcccggtcgaggccgttcagtgcaaaagaccacgcccagctctcgtcgcccggacacagcacgatgcaccctgcaggggcctctcgagtgactgtccacatacggacgcgacgacctttgcgtcgcgtgccgaccgctgggtcgttctgggcgggagggaacgctgccggcttcgctcgtcgcttgcaacgcttcacgccagtcatcgggcgctgcgagaccgacgagtgctatcgaagctccctttcctaacttgaggtcctcgtgaccagatgtcggcctggtcggcctctggcgaacaaagcgcggccctccgtttcttcggggccgttgggccgactgcggggccgactttccatggcggcctggggcgagaacggcgcgcccgcgactcgtccgacttgcagccagcccatctcgcctgccctcgaccacgaccctcttcccttcttcttcttctcctcctctccctcccgcaactcagctagcagccatggctcccgccgctcgcgagcccggccagaagggcgtcaactacaccaacctgctcgtcggctccgtcatgaacattgccgaggtcacgtcgctcggccagccgtttgaggtcctcaagacgcagatggccgccaaccgctcgcagcgcctgcccgaggccgcccggaccgtctggtcgcgcggcggtgtctttggcttctaccagggcctgatcccttgggtgcgttcgctctccttctctcatcatcaggctggccactggctggctggcgggcggtcgtcgcgtcctccctcccccacagacagcgccctaccccactccccatccaacacgagagcacctcgattgctgacgccctcgcatgctctcccttgccatctccctcctttttcttcttcttctttccctctcctgcgcatcctcgcactctaggcgtggatcgaagcctcgaccaagggcgccgtcctgctgtttgccgcgtccgagattgaggacgcgacgattggcatgggcatctcgcccggctgggccggcctcctcggcggtatgggcggcggtatcgcccaggcctacgcgacgatgggtgcgtccctctcctcttctatctcttgccggcctgctgcaagggctcccttccaacgcaccggcccgcgcgtccttcggcgtcggccgccgaaagccggctgctcgcccgcgcgcgcgcacagcaacgagagcagcactgcccgccctcctcgctccttctcacccagccagctcccgttcaactcgagggcgccgttactgacgccgagacgatgctccgctcgcttcaggcttctgcacgacgatgaagacggtcgagattacccgccacaagcagtctgcgaccggcgtcaagccggcgtcgacgctcgccgttttcgccgacatctacaaacgcgagggcatcgccggcatcaacaagggcgtcaacgcggtcgccatccggcagtgcaccaactggggatcgcggttcgtcctgtcaacatcattctttcgtcacctgcgaaatggtcgctgacctcgaccttcctggcttgcctcagtatcggtctcacccggctcgccgagggccaactccggcagatccgtggcatccgggagggcgagaagctcggcgcgctcgacaagattgcctcgtcgaccatcggcggcgcgctcgctacctggaaccagcctatcgaggtgcgccctctttgccgacgcctgctgcatttcgacctagcatcgcgcgcccagccagctgacttgcttcactcatcccctccgcctccaggttgtccggatcgagatgcagtcgatgaacaagtcgactgaccccaagattctcgccggcggcaagaagacagtctttggcacgctcggccacatctaccgcgagaacggtatcaagggcctttaccgcggcgtcaccccgcggatcggccttggcatctggcagacggtctgcatggtttggtgcgtccgtcttgctttggtctctgcgctggctgcctgccgggttgccttgtactgacccttgctcctctctgcgcgcagctttgcggactatgtcaaagactacatttccggcaagtagagggcgcactcgacactcactttctcccgtttggatccgcgtcgtcccgcactgccggtcggccagcctccgccccctcctcagcatcaaaaggcgcgcactctcacatcgctcttttagacactcctctcttcccttcctgcctttcgtctcttcgcatcagcctttgcaccgcagacccgtaccaccccacgaaccccgcctcagccttgctgccctcagtctccctgttcacggtccctctctccgctagagctctccgagttggcctccctcccccccttttctgttttgggtctctctctcatgagctttcttcctttaaagacgctagcgaacgagttacggaggtaggaggccatgtagagcgaggcacgtccccggctgcgagcgacaagcgctgctgtgcgagttgagctcagagcccacgtgtcgacatgccgacgacagctcaacgagacccctcgcatgtcagaggtgcaggcgatgcgagcttgcccgggtcggtatgtgccttctacgccgcagcgcggcttggcagtgacagtgggtccgagcacaattgtgcggttgggcggcgagacactcgtgcgtcgacggcacccgaggcggcggcgcgcgagctcgaagtctcgttgggtggtgagcactcttggccgaaagctcgagcggatgtaggctggccaaagcgaaggtcggctgatcgaccatttcaagcggccgagttggttgatctctgacggcgccgcttccaagcgggccagagcgaagagaggaggttgctcaccgggcgcagggaggcgggatggcgggcggcgctctcgctagcgggtaggaccggcctacttggcgatcggcatgccggtccggtcgagtccaccgcggttgccgggaacgttacggtttgggcaccttcggggacaaaacgggtgcagcagagggtcagcgctgaggcgtcgatgcaagggcaaaagaggaaggcgacgcacaagttggcaaagtggcccttctggccgcacttgaagcagaggacgccgctcatgtcacgtcctccaggcccgcctcctcccccccccccctccgcccccctgccacggacgcttctgcactcgcctatcacctcgctctcttcgtttgcggatcgcaatggggccttgctctcggatagcactggttcaggaacctcatatcgagagcgcgccgtcgacggcgagcgcctgtcgctgctcggccgtcagggcgtctgctggtgcgcagtagacctcaaacttatggttgaggccctgctcgctctggacgccaatcgcgctcccgaggccgccgctctggctcgggaggacgacgacgacctcgcgaacgcgcgagtggaggagcgccatcgcgcacatgacgcagggctcgtgcgtcgtaaagagcgtgagcgaggtcaggaggtagtcggccccgttcctcgccggcgtcgcgttggcgaacggcgggccggtccggagcgtcgctacctgccggacggcgtcgaggacggcatgcctgagcgggaggcccgtcgtcgtccgtgagtcggcggcctctgcccggatgcccggtgtcggcggaatcaggctgtcgtccttcctcggcaggatcgactgcggcggcgaggcgacaagcgcagcgatcggcagctcgccccgggctttcgctgcgagcgcggcagcgacgacgcggtcgacgccttcacgcgcccaggcgaccttgcctgccgtccagggccggacttcgaccccgccccgcaagggcaggtaggggaccggccagagggcgcacttgagcaggtgctggctcggcgtccggccgggcgacgtcggcaccgacgctacgaagggcttgaggcttgcaaagaagggaccaagcgcggtaagcgatgccagcagcgtcgtcaagtcgatcagggcggtcgggagcaaggcgaccgagttgactggcgaggaggggacggaggctcggaagcgtcagctgcggcgcctctcttcgacccaaaactctaacttggacgcacaagggatcccgccatcgtcggcagcagcgtttttgcccttgcggacgcgcttcaggtggcgcattccctcgtcgtcgtcgcgatcgttgtcgcagtcgccgctcgcgagccccctgacgacgccaaggacgtcgcgcgtcgccgttccttggccagggacgtcgaccgcccagatgtccatcgtcccccagccctcgtctgcctcctcggcctcgcggatcgagagctcgtcgcccgggacgcggacgagcgtgaacggattgagctcgggagggacggcggcgtcgagctcggctagtgcgagcgtcgtcgctgggtccgtgagaggcggaggcagcgcgagcaggaattcttcgaccgtgagctcggcatcgaccgaagaggtgcgagaggaggccgccattgccggtgtcgctcgagtgaagctggcttggggaggagccatttgaaaggccggtctcgagagccggtcggtcgtggtcagagggggaagagcatgcttaatcggccgtcgccggctgtttgtcctgcgccgccacttgctagtacgtccgccctcagtcatcgggatgatcgatgtcgtccttcacgctgcaagcctgtcgcggcctgcaatcaaaagacctgaaaatgatgagaggaataaagcgacatcgccccgagagaggaaacatgaggagggggaggctggcctgacacgagacgtcccgcgctcgacctcaaaggtcacatgcaagaaggaagagacacaaactcgaaagggataaaggcagggcgaagagggaagcgagtagaggggaaaggtgggagagcgggagtctacttgcgcgaccgcgtcgcccgggtcgcccttgccggcgcctcgtccggcacctcttccttgacagcggcggccgccttgcgaggcgcccttgctttaggcacaactgcggccgtaacggcggcggccttggacgtcgttgcacgtgcgcgggtcgtcttcgggacggggaccgaattctgcgagagagaaatggggggggcgtcagcgtccgggattctgggtcgtcagcgcagatgaagcgacgcagtgaaggcgggcttaccttctcgcccatgtcctcgtcctcatcctcgtcgatcggcatcgtcgccttgtgcgtccgcgaggcgactgccttcttggaggcagcagagggagccgccgccgtcttcctcgtggccgccggcttcttcgccgccgccgttgtcgccgccgtcgttgcagccgcagcgcgtgaccgggccgtcggtcgcttggcctcgggtgaggcgaccgcaatgacgttgtcctcgctgtcctcgtcctcgtcgacgctcggcgagcggcggttggacaacgatgactcggccggcggtggcgtcgccgcatgagtggcggccttgcgtgttgcccgtggcttgggtgcggcgggggccttgagcttggtggctgcagcagcgcgggagcgagacgcagccttaggcggcggtgcgggctcggcctcgtcctcgtcctcctcttcctccaccgcctctgcttcagcagcggcctctggctcgtcatctgcaggagcaggggatggtgtcgccgtcttgcgcttccgcgagctagcccccggcgtagccttcttggccggcggaaccacgcctctcgttcggctcgttgtcggcttcgccacaggtgcgggcgacgacgagggctcgcgagaggcgggccatgccagcatggggtcaacctccatgacaagctcatcgccgtcgtcgacggcgacggtgctggagaaccccttggcttcggcagaaggagccgcggcagtcgccgagggaggggcaggcgactcggacggcgtcgacctgctgcggcgtgtcggtcggggtgcgccggcgggagacggcgatccgacaggtgcgacctctgacgcagcatcaagctcctgcgagggctccgcatccgcgacacgaccggctgccggtgatgcgggaggagccgctgccgactcggccgtgcgaggcgaagcaaagagagcgccgacgcccgtgaacgacgggtcgacggccggcggcggctgggccggggtgcgaagcagctgccttacgcccccgtagagcggcgtctggatcggcttcttgaagaggtgcttgatagcgcccatgtctggcgtcggtggctcctctccggcctgggcgggtgccgaggtcgatgcaagcggcgtgccctgggtcgacgacgatgtcggcgtgcccgtcgtcacctgcgcaagccgcgatcggactggcgtcgttgccgagcccgccgcaaagggcgtcgggaagagcgacgacgcccgacgggggacgtcgccgccgccaatactcgaccgggcgccgatcgacttccgcttcagtcgctcggccttcttcgccagtgcgcgaagaggtgtcgatttctcgtcatcgtcgtcgctggatgagcctgctaagtcgggcagggtgagaggcaaggcggcggcggccggcgtcttccgtggcgaggagagcccggcgagatcgagcgtcgacaggcggggcaaggcacgcggcgccgaggcaaggatcgaggcggtcgacccaaggcgggccgcacgttcagcggcagaaggcgtctgctgagacgaaggaagagcaagtcgtcagcgaaaggccatccaaggggtgccgtgcaggcgagtgagatgttgctcacctgtcggcgtggagacggctgctgctgctcctcccgttccggcacaggctgtttgggcatcctgatcgggctccccatgctcgacctccgctgtcctccgccctcggctttgacgaaccgcccaacagcgccaacggccggcccggccttccgttctgagacgggcacgcgaaccggcgggcccatgcgcgagaaagcagagggagatgcacgaccagctggaggggcgacgcggaccggtgggcccatcgttcgcaagagagccgacgggcgaggggcgttggatgaggaggaggtggcctgaggcgtgtagaagcggttcgagaggggtcggctcatctggaggcgacatctcggaagtcagtgggctgcatcctagcgtcgttgtactcaacatgtagctcgacgaacctggggcgtgccggggagagcagcagcagggcgcgggctcggcgaaccaatctcctcgacagacgcaacggcttcggcgagctcgcctgaatgctcgtcgatgggaggctcctcttcctcctcgtcggcgggtgcaagttctacctcttcgtcgagcgatatttcggcctcctcgccctcgtcttgaagcggcgcctcgtccgtcatctcgtccatggaagcaacgagctcggccttgccgtcctcgagcggctcctcggactcctcctgacgaagctcgcccgagatcggctcgtaagcgccgtcgaaaaacggatcctcgtcgagctcgccttgatcggcctggacatcgttgaccgtctcgggccggtcctcctcagcctccctcgacgaaacctcgcgatcctcctcttcattctgcagctcctcttgcgggtcctgctctgtcctctgcttctccgccccgagcatctcctcgtcctcctccttctcctcttcgtcctcctctcccccagcctccagctcaacctcttgcccgacctcctccgacgaggtcgactcctgctcagcctcccctgcccctgccttccatgccgaccggacgaggatcgacttgcgcaggctgctgggaccatgccggccgaccttgcgggcagacttcgacgagggcgttggctgaggagctggcgggaggacgatggtcggcggcgcgttggaggtatcggcgggaggggcggtgagaggaattgtcgaagggccagcgctataaggcgtctcgctcgccgctgggagcgggacggagcggggggtcttgaacggtgtcgagccggccgtctctggctgacctcggaccggcgtgccgagcgcttcggcacttcccggggcatccgctgaggctgtcgctggccggatgggcgtcgaagcagacgattggtggtcgctaatcttacgcaggggcgagccggcgtagggcgattgcgggaggtcgtttggcatgagcgacatgcgctgcgacgggcgcttgcggcgtggggtcgccggtcgtgcgggcgacgccgggccagactgttcaaggtcgccgatcgcccagcagaagcagcagcaatgagtaagaagcaatgagtaagaagcaatgagtaagatcaatgatcgggagggacatgtcagccggccgagttaagggcaagcatcgagcgggcgagagcgggagaacgtacgccctgcgccccagccggcgcgtgcgggaacgagatgacaaagcgcttcttccgcatctcaaacatgtcgccccgcttgaggattacttccccgggaggcttgacgagctggccgttgacctcgacgccgttcgtacccgtgaccctgagcgttgcctggtgtgcggtgcgaccggccgaaagtggaggggatcagcagccgcggagagcgcaaaggttggaaatggcgacggacatggctctcgtcgggcgtcgagtggagcgtgcagtgaaagcgcgagatgtcgttgtagtagagccggacctgcgggcgagcgggaggtaaggatggaagaaggtcagaaggcggcgttgttgactgatggctctcaggcgcgccagatgacgggcggaggagtatagacgtacgtcgtttgactcatcgctgcagccgtcagaagggatgagcagtcgtgtcagtcgcttgatctcacgtcttccgagctgccctggccagcagatgcacgagccagggccaaaggcgacaggaggtgaacgtaccggccaaagctcgtgacctcgccgtcgaccgggtagcggctaatctcgctcccgtccttcttgcggatgaggcggagcgtgcagtgaacgccctcgggcggcacatcctcgggcgcgggcgatggctcgtgctccatcctgttgcttgtcgtccaagacgggatgcaaggtagaggagtcgagcgaggtcaacacgcagcacgaggcggccgacgcgccgctcgcgcgcagaccccccttttatttatttatttccgctggccaaccttcgacgacgacgacgacgacgacgggttggctgcacttcagccctgacctcgcaacccccattcaccgagcatgtcatcaaaagcaggaaagagcggcaagaggctctacacaaaggtgcgccgccgcgctggaacaaggtagaaggtagtgctcgcggtcagcttacacctttaaccacctctaggacggcacctacactggcgccggctcgatcaacgtttcggggccgggcatctgggtgacctacctccgcggcaaagagcggtccgcgaccgactcggtcgagtccgtgctcgaagagtgtgtcgacgagctctatccaggcgcgcaggaggtccatcgagtagcaaaggcggcgttggccgctgagcgcgagcgggaggccgcgggcgagggggagtcgtcagaggcgccggcagcagcgccggaggccgcccttgggaggaaggacgactttgaggacgagctccggcgcgagctcgaggagctgagggttgagcgagaagccaagaccgggactggcgctggcagcaaaggaaaggccaagagcagacgaccgccgagcttgatcagtacgttcggccttcccgctcgtgatcagctcagcggagggactgacctcttgtccttgccacctcagtccgaaggagcacagacgtcgactgctgtaagtagcgttgaagctaatcgttccgagacgaagcgggccgatgttcaaggccgaaactaacgcccgaccccggcctccttccagtgctcttcttctgcctcctccctccaatcgatccacttgccgtcgtcctccacctcctcaataggatatccacgactggcgtctcgcatctccaacacgtccagcgtctcctgccgacctcggcgagctgcacggccgacctgagcgaggtcgagcggtgcatgaaggacaaggtcctgccgggggtctttgaccagggcaaggcgatccgggtgcgtccccccttgctcgcccctcctccccatgtcgcaagccttcagacctgacttccaagcccatcgtcgagcagtacaaggtcctctaccagtctgcccagtcgaccggccttgaccgtgacgcgctcatcaagacgctcgccgagtcggtcccgaaagacgccggccacacggtcgacctctcgccgacggggaccgactacctcctgagcgctcggacgttccggtcgaccgtctcgctcggtctgattccaaacgagccttatgagcggctgaagcgcttcaacgtcccagcttgtgtcgagctcggcctccggaaggccgacgaggaagggacgggcggccgagggggcagggtcgtcatccagccgacgccgacggccgcttgagattcgccatgcgacgtgtgatttcattccgccaggtatgtagagcgagcacgaggttgcaagcagaagaattggggagcagggcctgaggcgactgcacatcgattagtagccgtcggccgatgtggatctcgacgacgaatcgctctccttcagcgacgggaccatttccggcaagacggttgtcaggagcatcattaacatcacagtctcaaggcttcttgccaaagaagctcatcatactcgtctgcccgcccttgccgacggtcgcgccacccttcttgcccggcgccggcaccgccgctgacggcttcttcttctcgccggcgccggcggtcgccgtcgtcgtagttgaggaggccgaggacgtccgtgagggcgcaggcggggcggcggcggcctgtttcttgggggcggatttagcagacggggcgacgacctggggcgagttgtcgtcggtgtctgccaatcgtcgaaaaggatgtcagcgacgcaacaagcaggcggaacgcaagtgatggagagagcgggggagacgcacagtacgactcgacgtccgagacgtcctcagtcaccatgaagccccgcttgttcatcgtcatctcgctcttgacgatccgccgcgtccgccgcaccttgccctctgcatttcggacgaccggctcgtcggccgcagctttggcgcccttcttgccggcagcggcggcaggcttcttcttgggcgctgcagcggccttctttggcgggggcgaagcgagctcaatcgtctcctcctcgtcatcagagacggcgaccgccttgcgtttgcctttcatccgagagcctgcagaaagacgaagggagggtcagcaccagcttaagagagtcagatgaatacaggcaggacgcaccggccggatcatcgtcactgtctgcgtcaaacaggccagccagctcggccttctgctttgcgacccgctcgcgctcctctttggtcgtcgctgccggcgcagacggcgctggaggcggagccttcttctttggctcagccggagcagccggtcgagcgaccgagacgggctgcttctttgctgccggccgactctcgtcgtcttcgtcagagtcggagatgacggcgcgctgcttgccggcgcccttcttggccgccggaggaggatggtcggccgcctttttcggcgccggcttctccttctcggccgctgccgggcgggccttcgaccagtcgagcgtgccaggcttctttaccggcccctttgaaggctcgacgaccgccggcccagccgctttcttctcggccgccttgcgctcgacaatctggcccgctttcagcctcgcctcagcccccttgagcatcttgcccgccgacggcgcctgcgacgtgccgtacgtcgctggatctagaaagttggggcgcttggcgagcgcaaggaggggcgcgacgagcgaggctgatgttgggagtggaatcgcagagagcgagtaaagcgagcgcgagagggtcgtcgggtcgaagtgcgctgcgcgggctgagggtcaggggccagagtcggtcgatgtcgattagcatgcgtcctggcgaccactcgcccagtaggcgcccgaccgaccttcgacctgctcgctccgacagacgacaaccttgtgctggacgaccgaccgtccggcagtcagcggcggcggccgcgaggcgctgccgcctgtgctgctgccctcgcccttgccctcgtcaccgtcgacgtccatcggtccggcactggtgctctcactggcttccgcggcagctaaacccgagaggcggtacgtcctcgcgagctctcggtggccgtcagcgaaggcttcgagcagcctgcgggacgccaaagaggagggctgggcgtcaggatctggcctgaacggagcctgacagtggccggtcagatgcagcaagacgcaccgctgagcctcctggacgcggacactgagctcgcgggcgagaatccgggccgtcatctagtccgtcatgagagggagacgtcgcgtttagctccttttcgatagcccaggacggatcgaggagacgacgacgcgtcgagtctcgaggagcacctcgacccgaccgccagccgaccgcccgctgggcacgaggcagcgcaagtggctggagacgcacaggcttgcggtccatctcgacggccctcgtgagcagcttggttgccttgtcgtctgtcatgaccagaggaggatggagctggttggagggtcagggacgggcgcgtctcgcattggctcgactgcgatctcgaattgcagacgcgtcccaatcaagagcagcaatcgacgcccgggtcgactctcttcctgcgcccgacgtccatcttctcctcacctctcttgaccatgtctactcctaaagcaggcaccgaatcctagtctgtccgctccgctgtccttccttctccgactcatcgagctgaccctttctctgcagcctcgtcattggcggctgcggctttgtcggcaggcacattgtcgagcagctcctcgcccggggcgagacaaaggtcgccgtctttgacctcgtccagcgccatcacgacaagtgggtcctcctctttgtacctcataaatctcgtcaggggcggaatgcgagagcgcaaagagagaggtcaatccagggaggtgaatgggagggacagatgcgatcaggcttcaccccgccgggcgacgcggtccctcccttctctcgaacgactcttgaccggacgaagggccggccttcctgcctctcactctgttgcgccctttcttctccgaatgaggctgacctgctctctccttgccaggaacgtcatgttttttgtcggcgacatcaccgacgagcaggccatcaccgccgccatggtcaaggtgcgggccgcttcccctccgacgcgcgtcgagccgagcttctcccgccccggccgttcgccgccgccgccgactgaccccgcgccgaacctcctcctccttctgtcagagcgccgcgaccgtcgcgattcacacggtctcgcccgtccacggcctcggccccgaagtctatgaaaaggtcaacgtgaatgggactgaggtgatcctccgggcgtgcgcgagctcgtcggttcgcaagctcgtgtttacctcgtccggcggcgtcgtctacgacggcgaggagaacctcgtcgacgtcgacgaaagactcgcttacccggccgtcccgctcgacgcttacaacgagaccaaggcccgggccgagaagctcgtgctcgacgccaacggcaaggacggcctcctgacgtgcgcgatccgcccggccggcatctttgggtgcgtcctgccttttcacaggaactggacaacgggccggtgctgatcaactccttctctcgtagcgagggcgacaagcagtgcatccccggcttcctgtcggtcctcaaaaacggtcagactcacttccagctcggcgacaacatgaacctctttgactggacgtacgtcggcaacgttgcgtacgcgcatctgctcgcgtgcgaccggctcgggtcgtcagttccgatggagacctttgatgagcctctccagtcggccaagctcagcctccggacggtccggatcccgacgagcgaggccaggccgctcggccccaacgccaacccgagcgcggccgaccgggaggttgccgcgcgctatgccgatgcctcgaccgaggctgccgatgaccgccaccggccggtcctccggacgcggttcgaccagtttgcggcgccgtcggtcgagtttgacgaggagctcgacgaggagtctgaccggccgccgaccgagctcagcgtcgccggccaggccttcttcatcaccaatagcgagccaatgtacttttgggatttcgcccgggcggtctgggccgagttcgaccacgtctctccctcggtctgggcacttcccaagttcctcggcatcatgcttgcctcgccggccgagacctacagctggctgatgcgccgcgagccgggcttcaccgtcaagcgcgtcaagtactcaacgcaggcgaggttttacaatggagagcgcgcggccagggtgcttggttatacgccacagacgtcggtcctcgacggcatcaagcggacctgcgcctggttcaaggctgaggaggcggccaaggcggccgccaagtgacgaccttcgccccctcgcacttccatcttctcgccccctcttgtaatccttaccgcacactttcacttctgctatacccgaatctccttggatgtaggacaatcacaacgacgttgacaggagatgagcgtaaggagcctcccaatgatgatggccggcgacgagggggatcggtgtgtcgtcggggaaagcgtcagggccggggtcgagatgctcgcggcgctgtgtaggttgacggcgagggtagagaatgcatgacctcggtcatctcaagaaaccttttctttgggtcgattaaggaataaggaaggtggtacatcagagagcaggggatcgccagatacgaggttgcttgtggcaccgtcaggcctcaacaggtctcagcggccccagatcgaccacccgccccgtcccagccgccgccggaccgcttctccgaccggcatccctcctccgcccgcgcccggcccggtcatcgccagctgacgcttctgctgtctccgccgccagaggccgagcaggccaaggatgagcgcgatgaggagccggaaggtcgttggccggaagaggatgcgcaggaggtgagggacggtggcaagcgagcggaggccagggttattgctgatggcgtgaggggtgagtgtcgaggtcggcgagtggccggcgtggcgggagcgtgtcgatgacgtcggccgaggcgtgctgcatcctgccgactcgtcgtcgtcttcgagggcagaccaggcgggctcgtcgtcgtcggcatgcaaggtcgagttggcaactggagtccgaggcgcgaggaaccggtggatcgcgttgacctggcgcgcgtagctgctcttcgtcgcgggctgtggtgagccaggcgactcggccgagcctgtaaatgccggaggtgtcatagttcggacgctgttcagcgacgaggcggatgatgaggatgaggatgagaggcccggcgagggcggtcggcgagaagaggtcgtcttgcctccggcggcgggtccgctgaggttggtaagaaaggtcaaggtcggacgacctcgctggatggcatcaatgaggtcctgtaggcgagagcgtcaggcggtcgatttgatgagtcgcggaagtgaaggaggacgtaccgtcttgcgggctcggccgaggaccatgtcttcgcgcacgaagcgcagtgcctcggcagcatccttctcgtccgccgcgggagagcagagaacgtcgaccgcccacgtctgcgcaaccgcctcgtatccgtctaaagagtcgccgagccatccctcgtccgacgaggacgctgtgatcggccgtgagggcgcgaactcgcgttcagactcgcgagcacgtgagaggccggcgagccgatgctggaggctaagcgggatggatgcctggaacgggccgaggatcgcgctcgcgctctcttgagcggagactccgagcttctggccggcgaggaggagtgtctggacgacctggggaggaagcgggatgtatgcccgtaccccgccaaggccgccgtcgccggtgctgctggacgaggactccgagcgcgacgagaggcgtcgcgggcccgcgcccggtggcgacgacgacgacaagagggcgtaaagggcctcgcacctgccgacgagcgcgcggaggacagaagcgggcgagccggaccggatggcatcgtctgtcctcgagtcgcccgtcaggctgccgacgtatgagcttcccgccggtgctaccggcgagctcgggccggccggtaaggaggaggcggcggcagcgtcgtcggcaacgaggcacgcgacgctcgtcaaccagaggacggccgcctgacgccgaacggcctcgcgcacttgctcccgtgcaggcgtgagctcagcttcagtccatgccgtagagggtggggcgaggccgagcgcgagctgcgagagcaaagcgaggcagcggccatgctgccggagaaggaaggcgtgcgtcgctgcgccgaggagaaacttggccgacgggagccgctgctggggtttggtcgaggcggcggcgggtgccctcgagagcgaggcgacggctgctggcatctgaagagcaatctacttcaacggaagggtcgtgagggaaggtgggcgtgatgggatcaggaggcaaccagcgctgcgccggcaggtcgagaagcccgagctcccgccgagctcgaccagttgaccagcaaactcctcccctcggtcgcacctgttctgttcttgataccggccgctcgcaggaggattagtgcttgctttctcacctcctccaggctcaagcaagagcgcccctggactgcttagtcggaaggggcgctgagctctcgtccaggctccccgcctcgttggccccgcgccggcataccgcttgccagctccccttgatatcagtggtcgacctagacgtcaggcaggacgagcctctcgacgtctcctacaacaaccaggcagactcgcgtccgatggactctctcggccgatcagcgcgacgcctcgtcgccgttgtcgccgccttggtggccgtcggcctcctctcgcacgccgcacggaccatcgtcgttgttgtctcgctcgctcgcctgctcgtcctcgcgcctctgctcgcgctcggtctcgtgcttgtcgccctcccagtctcggtcggcatcgctgcggccgtcgagcggctcctttctcagccgcactcgggtcggcagcgcgaggcgagcaaggccaggggccggctgagcttcacgaccgaggcagcctggtcggtcgtccagctccggtcgctttgggaagcagcagagccaagcggcacatcggctccgaagccggccctccatccttcgacgccggactcgcttcaggcgccggtcgacgccgtctttacgctcgtcatgcgcgactttgtccgggcgtggtttgaccggctctccccctctgcggccttcccgaccgagctcgagtcgacaattcgcgaatcgctcggtgctctcattgagcgcgcgattcgagttgacctcgctgacgttctcgtcagccggatcgtcccgctcgtcaccgcccacctcgatggcttcgctcgcgccgagacgacgctgtcaggctcgcgcaggcagtcgaccctcctcggcggcaccggccccgcctctgagggcctcgacgtctttctcgtccaggcgtttggcccaagcggtggcctccacaaggccatttcgggtcaggcggtcgacgcccggccggcgcaggaggcgcatctccgcgagctcgtccgaggcatcctcgcccgcattctgcccgagcgcaacaggagtccgatcatcgacatcatcgcacgcgaggtcgtcacttgctcggtcctcatgccgatcgtcgagctgctttccgacccagacttctggaaccggctgctggacgaacaggtgcggcaaacgatgactgcgtcaggagtacacttggctcgctgataacctccctactcgtcaccgctgcactcaggcgaccaagcacatccgcgaacagaagctgatccaccagctgcgagcggcactcgagacgacggcctcgaccaacctcgcttcatcagccagctcgccttcgcctgggacgactgcttctttaggcgtctccaccagaagaaacctgcaaccacgtcgacgggcagcgagcgtcgcctcctctcgcaggggcatctcgagccggaccgagcccaaggcatttgacgcgtttatcaagggcatcggccgtctggagggcgtgctagacgcccgacggatgaggagcgatgtcgagcgcgagatccgcaggaccaaagagctgctcggtgagttcgaacgcgctgctctgaccctctgtcggccgatggctgacgcatttccgcgctgcagaggtcagcgcagcgggcggcttgataccgacgggcgagacgccgaccgacctacgagcgcatctcgagcggctcgtctttgctcggacgcgtgtagaccaccggctaggccagctcgccggccctttgagcgttgatgcgcagcattcgtacaagctctcggcgctctcgaccggtccgacgtcgtcgagccgtgcgacgacgtcgctcctcgccatcctgaccgagccgagctcgctcagcttctttatggagtacatggagcgccggtcggccgtcctgcctgtccagttttggctaatggtcgagtcgttccgcatgccactcgaggactttgacctcgacgcagcagcagaggacgacgacaggctggaagacgccgagccggccgactccgagcgggtccgcacggcgaaggaggacctggggacgatctgggagacctactttgacgaagacgtccttggcggcggcatcgccgagcgctttggacccccgatcgaggccttcctccgtggccgtggcaggaagggcatgctcgccgctcgccgaagcatgtttggcgcccaacggcaagtctacgagacgctcgaggaagattactttccggccttccggagctcggacctctacttcaaagcggccgccaacgtgcccgcggctatcggacttcccgccgtcgccgtctctgcagtcccgcgtacggcggcgccccagccgccggcatttccgcaccgtgcaacaacgactggtgttgtcagtggcggcggtggccctgtcgtgcctcgtgcacgactacgcaaggctggctcggcgtcgagtagcctcgagcttaccggcggcaggccggcgccatcgctcgggagccctctacagccgtcactctccctcgggacgacgagccctagcgccgaacgcgccggcggcctcttcgatggcgacctcagccaatatcaagtcgaccgcaggccatcccctggccttgcatcgtcgtcaccgttcgctgtctcgccgcctgttcggtcgcctcgtatcctggccaacagccactttgactttctcatcgccagcgacggcgccgaggatgccgccgaccgaccgccgctgttcgtcgatccagacgacgacggcccgttagacgacgacgacttcatccagatccagcggatggaggccatccaggccgctctgaccgacatcatcgccaaggacgagtcgaccacgccgccgccacccgggccgccgaccgcaagtcgacgcaagtcgatgctcaggccgtcgtcgtcaaccggtcgccgtctaccttccgaggcatcgtcaatggccaggagcctcgactcgctgctggatccagcttcgacagttggggagtctgcagcggcggcggtggcggcgtcgtcgaatgctgcgcctcgcatggacgcatcgttgccggatctcgccaccgcccggcggccgtcaaagcgcgtcttcgacgacgacagcgacgatgaggacgctgtcgaagtagtctcgccctccttcctcggctcgctcgtggacgctcagatcgactcgtcgacgacggacgtgcgcgacctgacgtccattggcatcctccagttgccgggcgagatcgctcgggtgacggcgcgaattggcgagctcggagaccaggaggcgctgctcgatgcgctcatccgcaaggccgagcttgctgggaacaagcgcgagctcgcgctcctaactaattcgcatcggagcctcgtccgtgaggtccgcgggcttctattccagaaacgccagtgggagcaacaggagttcgactcgcgtctttcacccggccggacggctgtctcgattccgagcgcgaccaacgtgccggccgacgacggcaagcccgtaacgcgctacctgatcgaggtccagcagctcggcgaggacggcgcctttgcgcacggctgggtcgtcgcccggcggtacaacgagttcttcagcctccaccacgatctacgcgaaaagctgccgagcgtccgccacctcgttctgccgggcaagatgctcgtcacctccatgtcgtcgagcttcgtcgacagccgccgggtgggcctcgagcgttatctccaggtgcgcacagtctctgacttctccccttcttcaagagattcatcgctgataccgctctcgtcaaccattgttggacgagcaggcactcataaccgtaccggaagcttgttcctcgctcgagctgcgagcttttatgtcgcagatctcgtcttcgcccgagtccgcgacgcccccgggccaagctgcttggaccgggccgtcactcccgcggccgcaggacctcgtcaagtcgctctaccggacagttacatcgggcttggacgacctcggcagtgtcacggccgggcccgactcgatcttcgacctactcagccaaggcttgacgaagcaggccggggacctcgctgccctcgccggcctagcagccgatggccggtctgatccctccggcacctcgacctcggccagcgcatccggcaccgatctacccggcctggccgacctcatgggtctcaagtcgatgggcggcgagactgcgtcgtcttgtgagtcgtcctatgcgctctgctcgctgaatgaggcctagtcatgctgacctcctctcgcctccgtagacttcaccgccccaatctgcgatctctttgtcgaggtcttccagctgaaggagaacaactggctccgtcggcaagctatcgtcatcatccttcagcagattctgggcgggacgatcgagcggtctgtccctgcgagccttcagttggcgaggtttgcctgtcaactgacaccttatcgcgcccacagcaagctgcgcgacgtcgtcgaccgcctggcggggccagagtcctttgtcggctaccttgcagccttcaccaacacgctctggcccggcggtctacgtcgcccgccacccgtcctgcgcaccgaggacgagaagcgaaagacaaaagaggcggtcgcaaagaagctgccctccatcattcccggttcgtcctcatctaagctacctccatccccttgcctccgcggcccggctgacgacaggcacgctcgatcctcgcagacatcgcctccaatatgatcggccgcggaaacacgcgccgcggggccaagcggctatttgccgtcttgcagcacacaaagctcaaccagtcgctcgttcactcgatcatcgacgaggtgcgttggcgacccatgcttgtggaagttttgcgggcgactgacatctacgctcttccccgagcgcagctcgtctttgccctctttcccgagatccgcccgcctgcctgaataccctcgtccaccccgataccccgtcttgcctcgagcagacacttctgcccatatcctcctgaccggttgctcggcctcggcccgctcgatacccatagtcgcctgatgatacattgccattgctacagcagcgaccggccggctcagacagccttgcggccgagcgcgccggtccagtcgtatgcggcgtagctcttgagaaacttgtcgatccgctgctggttctgacgcgagtcgacccgcttcggcttgcgccacttgcgcggctcgaggtcgagaatggagccgatgatctcggctgcgaagtacctgcggggaagggcgagccaaggccgtcgtcagcaaggggatgtgagtgcgactgggtgacaggacgcacctcgggaacttgccgcccttgtcgccctcgtcgacgacgccttggtcctcggcatcgcctggtttgccaccagcgtcgtcgacgccctcgatgacgtggccaaagcccttctcacccttgtagtcccactgaaccatgaagtagggcaggttggcgacgagcgcgcgccggaagccgcccggccgggccgagaagtcgatgagcttcttgtgctgcgaccattcggactcggaggcgaggatgccctcgcgaaagtatgccggcgcgtcgtcaaagaggtcccacgggacggggacactgtcgatgaggaaggagatgaaaaaggaggtcagtcagtcagcgaggcagtgagactgtcgcgacggcttcgaacgaacgcctcgatgtatgtgtgccgctgctgcttgaagctgacgaccgtctcgtaaaagagaacgcccttgtcttgctcggcaaacatcttgatcagcgtcttcatgaagttctagagagggcggggcggtggtcggaatgggcgtcagtgccggccgtcagatgagagaagtggctcggtgcgcacccgaatctcgtcccagacgtcgtcgtcgccctcgagagtcgtcagcgtgtgctgcgtcggcacaatcaggcagtggccctcgacgagctcttcggtctgcgtgcaggcgaggaaggccctggagcccatggcaatgacagccgcgcgtggcggaccgtcctcgtttgccgggcagaactgacacgagtcgagcgccttctttgtccgagcgtagtctgcatggaaaacgtggaaggggggtcagcacctgagggggagggtaagggtttcaggtttcagcgtcacgcaccgttgatggcaaagagccgcttcgaggcgtccgtcttaagcttcttgcgcgcaagcttgtcggcgttctcgtcgaggtaatcgtttccctcctgagacagcatgtgaaggctaaagtcagccttcgtccttcggctgaccgcgcgaggtgagcacgcacgacgaagcgcccgtcgccagcaatcgccttggcgagctccatgtcgaggttcttctggtcggccgagccggcgccgaagcgctcttgccgaacgagttccgagagcgagatcgaatcgtcgtcggcgttgagacgaagcatttcgcccgtcttggggtcatgcgtctcgaactgatcaggtgcagggcgtcactcgggtcagcgatgcgtcggagctgccagcaatgcggcgccagagacgaaccttctctggtcgcttgcgcttcgcgcccggcgcgagcgggtcctctttggctccgaggccgacgtcgtacagccgacctcgaccgtcgacggtcggcaccatctcgaccttgtcggcccgacccttccctttggcgtcggcccccgactctccgccggtatgaccgccgccgccgctcagagagcccgccgcgcgcgaccgacgcatctcgacgtcgtactcttgctcaagcttgaccgcgttcggcttctccatcagtttggccttgaggacggccgcctgcagcttgttcagctcggacgccgacaggaccggcttgccgtcggctgccggaggaccggccggcacgtcgtcctgcgccgggcgcgagatagttggcggcaggactgaaggaatcggcgtcggcgggcccgacgccagcgactggaatgaggacgacctgcgcaggaggtcggccttgtgcaacgtccctggcgccatgccttcgccgcctggcgtgcgcggaccttcgccgccttcctcgcctggccgacggaagccggcccgcgatcctggccgggacgacgtcgatgaattcagcgctgcgtccgatgtgaacatgtagcggccgcccccgccagacgggccttggggcgtgctcgagccgctgcttcgctcttgcctaccagcccctcggctgtcgcgccgttcggagcgggcgtcaaggatccgccgctcctccttggcgtcctcaaactcctggagcgagtcgtaccgctcgcgggcgacgtcgagcacggggcggctctctgacgaagccgtctcgaacactcgtcggagcttcgtcattcgccactgcgagccgggcccgcctggaaccttctccttagaggctgtggagaaaccagcagtcaacggatgattgatctgagtagcagcacgaggccagcctagggaccgacaagaaggtgtcgcgacgccgccggcatcctcctgcatgagccgatggttgatctctcgtcggtggaacttgggctgccaaacgcatgcagtggacaactgggtcagcatgcatgcgacgcaagtcgtgcatctgtcctcgggcacgcacctcgtcctccttcttctgagcggcgagctcggctttctcctggcgcgaggtcgagatcgtcccgaacgaattaaagaggtcgccgccggcctggaccggctcgtccttcttgacgctggccgttgctgagccagcaccgcccgctagccagtcgtcgcgcttcgtgtcgtcggccataattgtgggagatgaacaacagggggaggcgggcgagatggttggagggcaggcagggagatcaggctagctcggccgttccaaactgctgacgcgctggcaagggacgccccggtagcgcctgctgcgatgcccgtgaacccccatcttgctcctcatctcacaggtccctttgctcccttgccttctcacagagacgtagtctgagccccacacgacatggccgagatcatggaaggcctccggctcgtcccgccggtcacgcgccacttcatgctggcggcggccgcagtgacgctgccgacgctcctcgcgctcgtcgacctccgccggttcggcttctactggccctggcttgtcaaggactttgaggtacgtcgccaagggggcgcccggagctgggacgcgtgggcatgtctgcatgcgctgctgagagctgacgaacttccctttgccttgctgccgaccgacccagctctggcgtctggcgacagccttccttttcgccggcaagggcctgccactcctctttgacgcgttcctctggcatcggacgagctccgggctcgagatcgacacgtatctactcgattcggcccgctacggctggagcttgctctggatcgccatcttcatccaggttcgtgccgagcgggcgctcttgtgatcggatccgacggctgacgcccccgtcgacgcgctttgactctcccatcgtttccagctcgagaacatcctctacttccagtcgtggtttctcttccggccgctcgtacgccatcgtgaccttcatcgcaatctgcttccagccttaactgactgctgcacgcccctcgacagctgatcggactcgtccatctctgggcgcggcacaatgcgagcgtcaacgtctccctcttcggcctggtctcggtcccggcgctctgtgagccgaagtcccggtcagcttcgttgcaaggcctcgctgacggtgcccctccttgctctgcgcagactaccctcctttcctgctctttgtcgatttgctcagttctggcccggacgctctcttgctcggctgtggaggcgtcgccgcggcgcatctgtattggtttctcacgactaacccatcgacggcaccgtcctgccgcatcctgtccgagccgccccagtggtggcgccgtagctttgcggccccgcccgcccaagttcggaccagcgttggcacggcgatgggcggtggcggaggcgtcggaggcaggggtccgggcgcagcggcggcagcggccggcagtggaggccacaactggggctctggcaaccgtctcggccgttgagaatctctcggccgtgctctctctgacggacctttcctgaagaggaggctatccggcgtcgtcacatgtcatgagtcgtctcaactttccatcgacatcatgcgtccgctgccgactcgaatgcgggtgagggcgctggctcgtcacccgaagccgccatttccgacctcgcctgagcaagtggcgaaggcgagccttcaatcattgccttcggcggaggcgacgcggccgcaggctccgccgcgacggccggtgcagcgacagacgtcgcggttggcaaggatgccgttgatgctggagtcggctcggccatctcgaccgttggcaacgcgtcctctgccggtgctgcgaggctggccggtggcgcgagttcgatggcgccgggagcgtccgtcggctcgctgatgctgattgtcggcgtcgacggccggccgatctcgtctgcagcagcaatggcggcgaccgccgcggagactagcggtgctggcgtcgccttggctgctccgttgggattggcagccttctcggcctcgagctcctcagccgcggcctttgcgttcaggaggatctcgacgtaatgatgcggccggcccggtcgcggaagctctggctttatcgaggcgaagaggtcgagcgacgtcttggccgcttgccgcagggcgcggaacgtgagagatgctttgcgctgcagcgaaaaaggagcagaaagacgtcggttaggatgggccctcagtaacggcgccagacggtacgactgacctctgcaagcgactgcaactggccgtcctctcgctcggccgcaaccgaatcgctgccctcctcggccgtcgctgcgagcgccttgcgacgggcgtcggccagtgcatcctgccgtttgatgcgcattgcgtagctcttgagatcgtcgagcctgcggaacgacgggtgtttcgacgacttcagtttgagggagctcgagacttgctaatccgccgtcacttacggtcgcgggttttcgagcatgtgaaggccgtcaacctcgtgctcctcccaaagctcagacagggctggcgtgccgagcgcatgctggatgcgaggcacgagcggctgcaattcgatccgacggcgcttggccgcgacagcccgcagcttgtcggtcgacatcggaggcaggtcgaagggcgggcaggccgcatctttccaggcagcctaaagtggggggcgaaaaatacgtcaactcgccgtcagcgcgagcaaggagggctgacgtacccagttcgcctcgcggcgcaggacgttgacgagcgagctcgagaacttcttgccgccaggcacagtcgcatcgagctcctcgaaggcggtccgccaggcttgatttagctcggcctcgaccgagccatcgacgacgaatcccggcagcttcgtcttgaagatttttggcggcggcttgccggtcgaggtcgaggccgcacgaaggaagtgaaggaggatgagggcctggatgagcacctggcgccggaagcccacgtcggacagctgtcgagaggacaaggaggagggctgatgagtttcgatgatgcgatgaagcgcatcaaagtcgtcaaaggctcacctcgaactcgagcagccgcggattggtgagaaatttgggcatgtagccatcggcctccttctcgatgtcctcgggctcgtcgtccaggtctgcgctccgctttttcgatccgtcaccggcgccgcgtagcacgcgctcgagctcggtccgcttgtggaagaccttgaggacggcagtcagccgggcgagaaagagcttgtacgtcgatggcggtgcggtggactcggtcgttgatggagcgggtacggtggtcgtgagcagtgacggattcgaaaaggtcgtctgcagtgaccagaaggtctcgtagaaggactccttgagcgcgactggcgtcaacggacgggggccgtgatggggtcagctttgggtcagcctagcgttttctcaagcgcttgccgactgaccagcatcggcgctcttctcttcgctctcctcgccctcttcctcttcgccctcctccttctcctccttgacttgcgacggctcagcagccgtcggctcctcgacgacaccgtccatcacgcggtcaccttcctccggctctgaggcgacctcaaaagtcgtcgtgttgccggtgttgaactcgccgcggagattgacgccgctcctggcactgaggctgaaggccgacgccatgaagccgaggacgcgaccgcgcagcgcggcgtcctccgccttcgacagacgggagagcagggcgttgcaagcacgtatcaggcccaaaccagaggagttctcctgtgccgtcgggaagggctgtagaacggacagcaggtgcgccgacgtcagaaatcgtgcggccggtcgacgcggttgtgaagccgtccccgtcgagacgcaccagcttgagctcggtgaagcgcagctcgaggaagccaaagacggcctcgcatccatcgaggctgagcgacgaaattgcctcctcgagaacaatatagggcgctcgaggatcgagcttgcctgggagcgagaggtgcagaggtcagcgcccgtcgagggcgggaggtcagacgcatgcgacgcacctagcgactgcagggcgagcgtgaggtcgagtacttcatagactcgggtatagatgaccctgtcttcatcttcgccttcgccttcgagagactggaagtcaatcgcattagctgacgcagcctcggcaaagagctgcagttcgggtcaaaatgagactggacgtacgacgatctcgagcaccttgttcttcagcccggcaacgatgccgtccttgacggctgctgcccggggtcccacctgtccgagagcggcatcgcagccatcagtcgccgcccagagctgctcggtgcgctcgaggaccgtcccgaaggccgccgtgttcgggtccgtcccgggcaaggtcgcgaagtaggtcgggagggcgcgcgcaaacgaggtgagcgcggcgtcgagcgaaccagccgacgacgacgcaggggcttcggccaagacactggacatcatttgggtcggcagggctcgagagagacgtagagaagaacggcggactagaatgcgttgctcctatgagaagggaggcagggaggcggatagccaggggtcatggtcgggcgaaggctgagctggcggcggcgccgacgagacaaacagtccgcccagagaggtacgatctctcccccttgctcctccgtctgcttctcagacagcaagcaggccgtctgctgttgtcattcagcggcggcggcaagaatgctgttcatctcacagcggaagaaccggcccatcatccctggcgacccgtcgcctccaaagctgcgggccgttgctgctgcgggcggcgacgcccaagtctcgcctaagccgacgacgacatcggccgctgactttgagaggcccctgcactctttgaaaacatgactatcgacgtacgccggtcgggcccaacagcccgcacttggttcaccgcttgccgaatcatcaccctcaattttggacaggcaacttgggcgtcgagtgacgagcggaaagcaccagcgagcagatgtggcgctgtggtcaggcgagcgcgagatgtcgctcgggtctagtcgttttggggctgggagtgcggtcgtgaccgagggcgaccgttcggggcgagagctgcacttcgggcaggtaggcgtcagacgacaagccgcaagaaggcgcgtgaggtggggaatggcgcaccttatgggagcgactctcatatgaggagagctctctctctctctgcagctcgattccgtgccgctagactatcgagtcttgatggcggtcgtgcccagatgctcgtccttgccctcacgctcccaccactcgacccagagtcggaggccgtcggcgagctcgcccttcgtcttgacgacccaggcctcgagccttcgaccggcctcgtcggttgtcacccattcgcgccgacgttcgtgcctttcgagccagtcgtccgcgagcgaggcgaccggcagcgagaagaacgagtacgcgcacttcttggccgggtcgacgacggcgtagaaaggcgcaatgtcgaggtcaaccggtccggcgatgatgccagctgcagatgatacacacgtatgaggtcagctccccgccatcgaaagggaggggtgaggtcaagacgaaggacgacgggttgagagcctgagctaacgtaccttcctccccagcctctctgacggcagctcccatggccgtctcgccaagctcctcctcccagccgcccttcgggactgttatcagcagcgaatgcgagggcggtcagcttctgtgaagtctgtgacgcagctcaagagtgagtagacgaacagatccagcgacgaggatgcttgcgcgaggagcacatcagcagctcgaccgttgcggcgccatccgaggacgtcactactcgaaacgggatggcgaccgagacagcgcgcggaccaggagacatgatcccggtttggctgcgtgacaaatggcaagtgggagagggcaggggcagaggatgtggtcagagacgacctcgtacggcaagggacgcgacgccttcgggccgctcgcagccccgcccgcacacgagccggaggagcagaatcgcgtccgccgaggcagcagactcgcaacagtcccaggtctttcggagatctcggcggtaagttcagtgagctgctgtaccagacgcctgaccagctgttgcattgctcgggacgccaacggcatgcgagctgtcttcatgggtcttgggctggacgacgccgctgcgcctccccccggcccggactctcctcggcgtcaatgcaagcacacccgacgtctcaacctctccaacggctaccatcgcatcttgaaccctccagcatgccgtctcagtcgcctcgtattgctattctcggtgcgtgcctgatcgccctgtcgacgaggcggaagtcgtctcgacgcctaggactatcggaggaggccggctgcctctctccaccggccatctcgctcacagcagatactgaccgaccgacccttgtccaggctccggcctcttcccgaagcaggcatacctgccctcactcgcagcgctctcgtcgtcctcgtttaagctcgtcgctgtttactcgcgctcgaccaagtcggccgagagcctcgccgccgtggcgaccgagaagctttcgctgcaaggcggcctcgccctttacgccgacgacagcccgacgggcaagggtctcgacgagttgctcgcgtcggacgagattgacgccgtagtcattgcgctgccgatcccccttcagcctgagatcatccggcgcgtctggcaggccggcaagcactgccttagcgagaagccggtcggcaaggacgtcgccacggccgaggcactcatcaaagagtatcatgacgaataccagcccaagggcctaatctggcgtgtcgccgaggtcggtcactcacgctccagcgcggagtcgagccaaggctgacactcgtcgtcgacgctcggtcagaactttgagtgcgagccgtcgttccgccgggcgggcgacatcctgcgctcgggccaactcggcgctctgaccagcttcgactggagcacggtcaaccgggtcgagcaagagggtaaccagtggctggagactacctggcggaaggtgggtagctgcgatgccggttgcaaccgatggtcccgccacttactctcttgctccggtctcaggtcccagactaccagggcggcttcatcctggacggaggtctgtcctgtttgtcgcaacataagtctctgagcgtggcctgaaatgtcgtgcatcgactctcgccgtttcttcgccgcaggtgtccacacgccggcagcgcttcgccagatccttccttcgccggtcgcctccgtcgtcggtcgaacgagactcgtcctgccttacctcgcaccggtcgacaccctcatctcgacgctcgagcttgcttcaggcgtgcttggctcgctccgcaagagctgggcagcccctcctggcaagccgctcggtgactggttcgacgcctggtgcgaaaaaggctacctcactctcggcccagcggccggcggcaagatcaagctcagcgtcttcgaagccgggcaggatgtcgtggaagaggtctttgcccggtccggcgtcgagcgcgagctcgcgagcttcatcggatgcatcgctgggaccgggcctcaagactgggagcgcgagggtgaggagattggcaagccggaggaggcgctcaaggaccttgctctgatccaggctgcgctcgagagcgacggcaagacgatgactctttgaagggaatggcatcttcgtcccgcgactcgctcatgtgaacccgcagggtcccagccacgagagggaggggagagatggcacgaaggcaagagcgccgacaactggccggccgaacggagagatggtggaggcagagccgccgtcggtcgttttcgaagtctgccctagccgctgcacaagtcgtgcctaggaccgttgtgagctggtcgtcgtcgagcaggaaaggaggcagcgctgcgtgcgcccaccgctttgcaggagtacttgttgggttctgcagtcgatccgttccccgaaagacccctgatgcaccgccgcgatttctagcgccggccggagcactctcgcgagacggcttcacgatccgacgtcttgacgtcgacgacgagcgcaggaaggacctcgcgcggccgggtcgctgacccctcgggaccgagcagcgtcgcattgacggctgcgctgacgttcctttctagactgaccttgcctcgcgcggtataagaggcagccagccaatcgagagctgcggaactcgaccaccatctcgccctcgcccctcctcgatgctgcttaagccatcgactgcccgcctcttcctcgccacacgcaccccgctcaccaccaccaccagcatcaccaccgccaacgtcctcctcgcccgccgcaccatgtcgtccctttcgtccgccgccgagatgatgtcgaaccagcacgcccggctcgacctcgccaaggagattaccgtcgtgcgttcctgctggcggcctcgccctctcacctcctcttgctgactgccttgctccccctttcgaaacctaggaccacgacaacgtccgcgatctgctcgaccgctacaagactgcgaccgagcccgagcttaagaaggcgctcgcgagcacgctcatccgcgagatggccgtccacggcgacgccgaggtgcgctgcggctctcgacctctcactgtcggccgctgactgaccgctttccccccatctcgccctggccccgcttgcaggaggtctcggcctacaacgtcttccgtaagcacggcctcggcgcccttgtcgaccacgacctcgaggagcaccacacgatcaagcagctcgcctacaaggccgacacgaccctcttctcaaacgagcagtacgacgagatcctcatcaaggccgcccaagccttcatcacgcacgccgaggaggtcagtgcccggtcggccgtgcgaatcacctcttcagccttgagactgacctctctctctctcttgcccgaccacaggaggagaaggaccagctgcctcagcttgtcgccaagatgacggctgaggagaacgacgccgaggcgcgcaagttcctcgccgcccgcaaggccgcgcccgagcgtccgcacccgctcgctcctcagtcgggcggcgtcctgcacaaggcggcggcgatgcagtccaaggtgggtcgtcgctctcccctttttgcctgaccaaccttgaggctgacgacgaccgttcgccctgtgcccagattcacgacaagatcatcacctcgctccagggccgcgagtatgttgacgacctccgctacaagcacggcgccgaggtctgagcacggccaccgcccgtcgtcgcgccgcggacgacgccgcctcgacacggccgaatccgccaaacgatcgaccgaccgaccgctcgcccctcttttctctcgtctgagtctcgcgcccgacacccccccatgtagcccttaccttctcccttctgactcgcctcctttacgatgactcctttccgcccgaccgcgcgcagaggagagacagaaagagggccttgacaggagcgtctatgtcctaatgttcgcccatctgactttgtgcgctcgcgggccttacgattcttccctgctcggcgtgctcgactttggacctgttctgacggccctgctcgacttagttgttgccatcgctgtcgtcgtcctggccgacacactcggcggcgagcgtgtcgagtggcaccgtctctgttgcgcgcctcagcgcacgtcctcgcctgccatcgcaaccctcccggcacgaatgtccatgcgcctcggcgatcgctagaagctcggcgagcgcgggcacagggcgagagcacaatcaagacagcatagggacccaagaggccggcgagaggctacagtaggaagggactggatcggattaacgggagagacaggaagcaagagggagcatacgggacggcgagctggggtcaaacgtccattccaggagaggcaaaaggagtatcatgggggtgatgaagagcagcaagggagagagagaggaggacggcgagggccgtacgtgcgcgtccgacgagcgcctcgacctagaacgtctgcttgccccgcgtctcgaccgggatcgtcgcgacgcagaccatcgagaggagagcggctccaccggcgaggtagatgaccgagtaggacgtcggcgagtagatcgtctgggcaatcagcggcgcaacgattcccgagatgcggccgagggtcgcggcaaacccgcaggcgctgccgcggtagggtgccgggaagtactcgggcgtcgaggcgtagaggatggcagcataagccgactgcatgaagtactccactacgaggggagcagggtgcgagtcagcatctccaagcgtcgatcggatagcaagctgggcgacgcactagcgttaaagccaacgaagccggcgacattgtcgaccgcccggaagaggaagagcgaggctcccattagtccggcgctgatggccatagaccagcggcgtccgagccacttgacctccatgaggagaccggcggcgatcgtcgcgactgaaggatgaagaagaaagggggcgatcggtgtcagcgggcccttcgatggcctcaggagagcaagcagggcggacgcaccaatgccgggcaggtagacgatgacatagttgcggtacgtcgtgtcgatgggcagcgaggtctcgatgcccttcgcgcggaggatgagagggaggaagccgcccgcgatcgagaacgagaagaagagcgtgatctgtgcggacaatcggggggaggggcagagacacaaacggctggtgagcatgaaagctcgccagggacgcgaaaataatcaaacgcacgtaggagagagcgatcgagacagtaagccaaatcatcctgggcgtcgcgaagaggcctttgaggtgcttgaactggccgaccgagcgcgagaggacgtgcttggcctgctccttgtttgtccgcttctttgtgccggcagccgggttgagcgccgcagccgagtcaaacgagacgtcctgctgttggtcgagcagccggaagtcgtccatcgtgagctcgggctcgggcgctttgttgaaggcggcgatcttgtagaggacggaaatggcctcctcctcgcggcccttcgacaggaggaacctgggagagaggagaagaggcggtgagcttggcgggcgctagtctgcgaggggaagacgtaaggacgcacttggggctctcctggaagtcaaagaggaagaagcggatgccgaagatgaagagcgtgatgcagccaaggcagatcatgagaaatctccagcccatgttgcttcccttggagcagcaggggatctcgcccgagctgcaggccgggaggccggtgtcgcacgagtacttggggacgaggccccaggcgatcagcgaggcgacgacgacgccgagcggctggaaggtcgacagccaggcgaggaggatgcggcggttcgtcgggaggaactcaagcgtgatcgtggcgtcgaccggaatgttgcctgagggaggcgggcgagacgaagatgccgagaggtcagcaaggccgccgttcgattctgatggagagcacctcaccgccgactccgaaaccgatcaaactcgtctagatggcgggagcactcgtcaggtttcataaggtgcaagaaggcgccgttttgacatacaaggaagcagatggcaccgtagttggacggggccgcgaagaggaggccgaagacggacgcgataaggcaagtgaggttgaagcaccagcggcggccgatgatgtcgcaaagcaggcccctttaggaggcgcggtcgtgcacgtcagaacttgctgccctctctcgtccttccgagcgacgtaccaggtgaaggctccgacggtgagaccggccgagaaggcggccgataggtcgccgacgtggttgtcctcgacaccgagctcctgctggagcggaccgatgacaagaccgaacgcctgagcccacctgcgaggcggatgagagcggcgtcagcggcagcggcagaggagagacagaatgaagacgagctgcggacgaacatcaggtcgaggaactgttgagccgatagaaggcgcagggtcgtcagccagccggatcgctgcgcgctcgcgcggtcaaacaaggacgcacgtagccaaagccgcagaggaagaagatgcagatctggtagcgaccgaggccaaaggtgccgccctcgttcatctttgagaaggatcgagagcgaggtcagccaagagcgacgatcggaggaaggcgtcgctcggagccggcggcgcagcacgcaccttgtcgagctcgcggttgatctgcaccgaagagtcagcgagaggtcagcccggatgctacgagcgagcgtctggcagcagcagggcgtacgaggatcgacttgcgctcgtctgattgagtggcgggtcgggcggatcggaaccgatggaagggtctcagctcggaagctccagcccgcgagcaagcatgctgtctctacgcacagaccgagaggttctcctcgtgcaggcccttgatgagcgtcgcctcgtcgacgtgggtcaggtggccgagcatctcgttcgtcttgggcgagagcttcttgacgtcggcatcgacgccaggcgcgatcggagcgtcagaggtggcgacgtctgggtgattggcgatcgtcgaggccatggtgctgcggatcgggaggagcgggaggtgctcggtagacgacgtgacggagaaggaggagagggtgtcggtcgagagctttgttgtccgacgcgagtgtggtgggtggcggtcgaaggagaaagagaggaggaggagggcgaagagggctgaagatcggaggggggggaggagacacggcggcgggagcaagggggcggccccgcaaccgaatgggcggccaagcagggattcatcttccggccatcgatttggtcgctcgtgcgagacgccacctacgagccgttctcatcgaccagctcaagtcgtctctggctccgactgagggcaacatgctgacggactagcggcgagcgatgacctgaagagaatccatgagattgggcagcaaacggtgagcggtggcgctgccgagcataaaggccgccggccgcgcctctcggagggttcggagggcagggcgttgtgctctcgagaagatgggcgcgctctgaaagcgaaggagagagcgtgcgagtcgtggcgtcggaaggtcgataccgagctgctagcgaactgcccgaccgatgcgaagaggtcggccagtgctcctatatgaagtcagggcagagatccgaaaactgcgtgcaaccgacgcatacagtcgagcttccagttggacgttcaacggcgggcgtcgaaacatgagcagaccatttgaggactgccctgtgaggcattcaagcgcttcagcagcgactgctcctcgttcgagtaggacgcagggcaggtcagcgagcgagcgaggccggtcaactttgagggcaagatgccagagtgagccggagagctttccggcttcgcgacctgcgcagatacgaagagtcgacaggttcgaggtggggacggcggcgcccgatatcgacggcaggatgggggatccgtcctctttgggccaagagcagagcgaggtgcgcccggcgtttcggaacagtttaatgagtcgatcgcagcccgtcgcccggaaggttgatgcggctccacggccatgggacggcagacagacaggtgccggccgtctaccctgcttcgccatggatccggcgagcgtgtagggcgtgctcccttcttactcgacagaggtaaggcgagcatcgagcggtcgcgtcgagccggtcgagagctgagcacctgcccggcgcgagaggccaggcggctgggagatcgacgttgccggtgaccggcggcgctcgaccggtcgaagctgtccagccttcagtttccgtcgagctctgggtcagctagataagctcttctgttcctctggggcaacctgccgggatgtcaagatggaccggtcatcgttgctggggaggcgagcggaggtgtcgacctcagccaaggcaggcgaaagctaggattccgcattcgaaactccgccgcccgcgccggccggccgcgttaccctccgcctccgccgcctctccctcatacgacctcaaccttgccttcctcagcaacagcccttctcgcccccggtcgtcttgcaggctctccgtagcaacacacgcctgttagcagcgccagtccgctccttcttgacaagcagcatccttatggcgtcctccctgcggtccggctgcagcagcctcctgcgctcggtcgctcgcccgacgtcgacctcctcggtcggcccgtcgtcctccgtcctctcttcctcctcgagggtgggctcgtctagcagtcgaagcgggagcagcctgttcccgagcgctgcatcctcgagccgagccttctcgtcctcgccgacgctcggctcgcacatcggcggcgcggccatcacctacccggcgtcgtgcaagctcgtctctgacctcgtccgggaggagattgcggtcgaaggcccgctcggtatcgagcgcgtcgccatcaagccctacgtccggctcttccactcgctgccagcgacggccgacggcgagggcatcctcgaggtcgccgtcgacgaccagacggtcaaggcccagcgccagatgtggggaacgacgcgccagctgctcgccaacgccgtcactggcgtaactgagggcttccggctgccagtcaagctgattggtgtcggattccgggcggccgtcgaggacgcgcctgttccgccaggcggcgacgcaaagctctgggccggcaagaagcggcttaacctcaagctcggcttctcgcacccgatcttgctcgacgtcccggaccacgtcacggtcgaggtgccgatcccgaccaagttctttatcagcggcacgagcctcgggctcgtcagccagttcgcggccgtcatccggagtcatcgcccgcccgagccctaccgtggaaaggtgcgtcgcgatgcgagtcggagagcgtctctggcgttcagaagctgatcctgactgctcgctcaactcatagggtgtctttgtgtgcgtcttgctgacggcctgcagccatctgtgcgccgccgctgatcatctgacccgcgcgtcccttcctctctcacagcggcgacgagacgatcaagcgcaaggagggcaagaaaaagtaggttcgtgatacgctcgcaccttcgccggtgagtcgacgcctgacacgccgctctcctcccacgttcgtctcgtcaggtaatgctatgcaaggaaacgtcacacgacctcttctagcgcggctgcctctgcgccctcatgccagattctgtgagcgagtgaaggcttgccgtctgccggggcggactcgcagcgccggatcgacgcaagtctgaacgcaagcttcatgatctctctcgctgctgagcctcggccacaaaccctcaggcgtgccgtctccatctaccctcaccatcgcaccccccagcaacctagcctcgcagacgcgccgctttagtggtgggcgtcgtgggtggaaacgaccttcgagtccttggtcgcctcggcgatctcggggatgacggccgcccacgggttgtggtaggcgagcttgtctgcaagggcggttaaggaatagcaacgcgcggtcgggtggtggtcagtcggttgaagccaagagacgagaggcgagataaaggaggacgcacagcagcagccgcactccttgcaccggccgatagtctcgccctcaaccttcatccaaaggagctcgtgcgagtcgaccgggtagccggtgcagccgatgatacgctcgtcaatctatgcgcgacagggcagggacagtggtcagcagcggttcgtcttgggaagcggccatgtcgccacctgctgtctgtccccctaacggaaccagcggtagctcgaggatgcgacgaccactgagaggacgcggccagccggacatgcctccccttccctgctcccagacgtctcccacgcaagcgattcaagggagtgacgacgatacgcacgatcgagttgaccttgattgggtcctgcatcgtgcccatccggccgacctcaaccggcgccatgtcgaagacgtccacgccggccatgtttccaagcagctggtaacgctcgacaccggtcgcctgctcgtagtcggtcgggatctgttagacgggccgcaggattcgtgtcgtccgagggaaagaggggtaaatggtaaccggagaccagaccaagagggatgacgcgcgacatggagcggaggccggacgtcgaccggagaggcggtgagaaggacaggcgcagcggagagaagcagtgaggcgtaggcaggcagtcgtgcacgcgaaaggaggccggcaagaagcacaagcggtcgtcggcggcagacgtcggcgaggcggacgaaggccgaggaagatgagcagagcatggaaggaggaggacgagagacagagcggacgtcagctctgtcgcttgaccctctgcgacacaatcacgcagccacccagccggcgtccacagcgacgccgaacggcaggtgaggtccgcgctcgagctcgggacgcaccatgccctcgggcgctccgggaccctggaggatggtcggcgtcggcgcaccgccccggagagcggtctggaccgagaaggtgcgggcggccgagttggcggcggcggcgacgcgcggagcacggagagcgacacgggcgagggacatggcggagaactaaggaggaggaggagaaggaggaggttgggtagcgtgcgaggtcgagctgaagctgagcggcggttggctcgccgggcgcgggcggcgggcggtcgccgcgagaccgagccgaggaaaatccatctattccgtctaagtccaaggcggctgacttcggtcggtcgactggaccgagcagcgcctccttctcagcagcagtcctcgcacgatggacagtcggcccgagcccacgctcgtctctgcgagagaggcttgcccatcgggatattgacttgcgagccatcgaacgaccgtcggacccacgcgccgcaacctgctcgctctcgcctcgtcaagcgcagcagccctgcccttgttcggctggcccgcctttcacccacgcactcggcctccctctcttccgctcagcgatgaaagggaggctgccaggctgaccaccaccttccgacttgacccgagtagaccttcttgcatcctccaaaaccctcgtctctcaccctcgccaagcagcgtctccctggactggctcgagctcgacgaccttgtccgctcctgtcactcctgaacctgacacgtctctctgtcgacgcccttgttctcggtcgtcacctcgagcgagtcgctagatgtacggctgtaggtcgcctgagctgcttgcctgccgtctaactggcggcctttattgaccgctctcggctgcgcgcaccccagctcgtcccacgtcgccctctccatcggcccggaccggtctgagcgccctaacgagctcctcgagggcctcaccttctgcaccctcttccgttcgctcgaccgctcattcgcgcgggccaagtggcgagacgacctcacaggcgtctgcagcgccggcggctgaacggttcagcgtcgtcgtctcgctcctggctggcccgcgagcaccaacgtcggccgtcgatgccatcgtacgtcgcccggcagcttcccttgcggctctgcatcttcccactgaccgtagcacattcgggctctttcagctgccgatgcgtttcgttcaaaagcgcaagtcgacctcgggcccgctcaacctgacatcgtcggctgccgccgacagcccccaccgcgccttgcacccgaagccgtcgatgctctcgatgccgtcgtcgtcgtcgtcgtcgtcgagctcgtcctcgagtagcaggcatccggacaagtcccggagggtccggctcgtgcttgtgcctgcgacatcggccgtactcgagatcagggacgaaagcaaggacaaggtgctcgtcgctgtcgacctcggccggacagaggcccgagcggtgcacctcgcccatcgctcgacagtccacctgccgcatgtgctcttcttgcccttgtcgacaggcgaaacggagcacgctgcgggcgaacacccgccggcctcgccatctgttccgaccttccgcgccaacctcgccttcgaacgctgcaactcgccggcgccgctaggccgcggacaagcgtcgccttacagcgctcgacggccgggttcttcatcgagcgtctcttttaacggctcgcctctctctggcgagaaggccaggtcaaagggcagccgcgagggcgggatgcaccttgcgttcgacacgctggccgaggcccagtcatggcttgcgcttttcaagtcgttggccatcccagagatctaccactgcccttctcgggtggctttcagcacgaccccggacggcgactgccaaccggccgccgagaacaccgagccgcggccgttccgcctcaagcgccacctcaggatcaccatctgcgaggcgcgcgctcttatcttctcgacggcagcccaaccgtcgacttcgagcagtgtcagcaaccagtcgtacggcacccttcggtcgcccatctctcccagcacgccagtgccgtacgacctccgctcgcccggcctgtatggtcgtccgacgccggcagcagagcgcgatgcgccggccgtcttcgtcgagctcgtctcgggcgcacatgtgatcggacggacgacgaccaagcgccggacaacggcgcccttctgggacgagacgcttgcattccccttctacagcgtcgcgcctgcgccggctgagggcggggagatgctcactctcgttgtctaccgtgagaaggcgacggaccggcttgcagtcgtcggtcgcgtcgaaatctcgctcagcgggctgatcaacgaggatgcgtggtggccgatcctcagcgagacgggccggaggatgggagatctgagagtaggtcgaaggtacactcttcggagctgagcgggttggtgctaacatcgtctctcgtccactgcacagctcaagcttcgcgcgaccgagcaggtcgtcttccctcttgtgcgatatggcgagcttgcaattgtacgtcctgctcacacgacgcacgccctccactggcgctgacctccaacacccttcagctcgcccggcaagcgaccgacccgatcgattcgctcctcgccgcaacgctctggcgtcgcgacctcgatcagtcactcgccgcggagaccatcatgaagatctcgaccgcccggggcaagattgccgaggtcgtcggcgggatggtcgcacgcgaggatctctcggccgacacgctgttccggagcaacacgccgttcacaaaagtgagcttgagttgactgaagccgagactcgaccaaacatgagctgacactctgcgttgccccgccagtgcttggactcgtgcctcaaggcctttctcttgtcgtccttcatcccgcttgctcttttccggacggtcaaccgcgtcctcgatgagaaaatagcaatcgagatcctcccgccgtccagcagccgagcggccccgtcgcaccatgccggccttacgccagaggacgcagatcggcatctcaccgaggcccagcggcgcgagctcgaaggccaaaggcaggcgctgcggaggctggtcgaaagctgctgggaggacatctacgccgcgcgacacaaggtgccagagtgagtcacaaagacctggacgactgcgactctgtcagctgactgacttgctgcaaccgctctctcgtcgtcaggcacgtacgcgacgcattgaggaagatcttcctcgccgtcccgccagaggtcaagtggcgggccataacgacacttttcttcctccggctcgtctcgcctgtgatcatcgacccgcacgcctacggtctcacgctcgcagtacccgagggaccggcccgccggacgtatgttggcctcgctgcagctcagagccagcctcagggaaataccgctgatccactaccctccaggcttgtcctcctcgccaaggcgatctctgcgctcagctatggcggtctctcggacaagcagcccgagatgtgtgaatctctgccggcgacgggtctgcacttcgtgatctgacccctcacttgacccggcagacctcgtcatgaacgacttcgcggccgagcggcacgagcaggtcgtcgacttcatcgcctacgtcacgcgcaaggacgatgacgactcggcgagtatccacggccgcgagccgaccggcattgagggcattctcgctggcgcggtcgagggcgaggcagccaatggagtcgcagaccttgtgcgcgaaagtctcgagctaaagcccttctaccttgacacggcggccgactcagcgtaagctgggccccctttgcaggtttcgcgagcgacttgccgactgattgcttggcttcccgaaccgtctgcgcagcgtctttgccggcctcctcgagcgcgctcttgctatgatcgccgagggccggcccggtcagccacctcgttaccccgaactcggtactttggtcgcccgcatccggcacgacgaacaggatgcgctcgagttcctgctgcagagccgcatgtcagtctcgtaggtcgttcgtctcgctcatctcaagtcgacagctgacgtacgtctgtcacaggccggcgagtttcctccctcggtcgttcatccccggctatctctcgctcccgctgacgccgtcggtcgaggatgactggctgctgaatcgaccgccgacccggacctctcgctcgcatactatctcggacccacccggcctccaggcgccgtcgcgaccgagtctcaaccgcggacggtcagagagcacaagcaccgttagggacggtgacgacctcgtgtctgattgcgcgctcgcgaccctcggtcggactcgaacggccgagacgagcgcgcgccggccatcgctcccgaccgctttgctttcgccacgactgccgactccggtgttcggcctcgagtcgaagacgagtttgcgtactcgtctcgggtccagcgaggacgacgacgactggttgaaggacgagcgccactatgccgagcagagggcgacgtttgcggccaagatcagcccgcgcttgccgaactcgagcatcaacatggacgccaggatcccgctcagtgcaagccgtcctgtcgcaaagacgacaccagtcgaccagacgacaacgaccggtatgtccctttgtgcttcgagactcgacctcctcccgctgaccccctaccgggtctcgcttgcggtcggcaggcggtcgtcggaggtggaaggtgtggaacatcaaactctagatgcacgaagggggttgctctacatgtcgagctggaagcgcacactttaagagacaggctggccgaagacggggagacgggtgattcgcggccgacgacgtgccgaccggcgtcgacgcctccggccgccgcaagccgagcccgtggccgtcagtcgggtgggtcggtcactctcggcaggtccccttcgacagccatcaggagagaagctcgagcgagactgtcgtcagctcgcttgccatcagatcaccaccctcatctcctcgaccagctcttctcagccgctatggccgaccaccagcagctgctcgtaaagcaggcccttgactcgatcgcttcctcgctctccatcctcgagtcgctctcggccatcccgccggccgacgctgccctcatccgctctcgcctgcctggctcgtcgtcgaccaacccgtcctcggtccacagcccgggcgggagcctgatcgacctcggtcagcacaacggcggcggcggcttgagctcgtcgccctacccggctccgatctatggccagaatccgccgcagcacaacggaggaggtgcctaccgtgcaccccctcccttgccaggtcggacagcaggactctacgaggtccaagcgtcctgggattacgaggcctcggtacgtcgaccggccacactcgacctggaggaacggcttgtcatgcccgcgcagctgaccaccgactgtctcctcctgcataggccgccgacgacctccctttccgtaaaggcgacctgatcgtcgtgactgaggagcccaacgccgactggcacaagggctttgtcacgagcaacccgtcacgcgtcggcctctttcctgcgacctacgtcgtccggcagtgcgttcgcctcacctttccatgaaagggaacttgcggctgacgagcgaccttctcgacgtcgacagaacccgcagcgaccctcctcctcggccgtattcgtcctcgccagcgccctcacttcagcagaacaattatggaagtgagaagcaggcccaggcctaccagcctccgggttacggtggtccgcccccgcagcgccagcattaccagcaccagccgccctacggcgcaccgccgcagcagatggtcccgtaccagcaacagtaccagccgccgcctcagcatgtcgtccagcaccagccgccgccgccgcaagacgtcgcccacgccccgccgccagagaagaagccgagcaagtttgacgggatgggccggctccttggtaagtcgagcttcgctttcactcacccgctgccctgcacgtccttctcgctcacacttgccgttcggatcgacagcgagcagcgccgtcggcggcgtcggctggggtgcaggtagcgccgtcggctcgggcttgatcaacaagatcttctagcgcccccgtctgccctgcgactacagcagcgcggctcttctcactttcgctcgcttctccgacttctgcgcttctgctttcgacgacgctgtcgactgtcctccctcacaaattccctccacgtaacgctacctcgcaccctcctctcttctgcttcttaacgatgacgcttttgaacgtaaattgaagggtcatgatccaggttcattgtccgagtccggtccagttgccctgttccgagtcgggcaccttgtggtctttgaggttcgcattggcctcgtacatgacgcctgtcgggacctcgcgccggagccggagtgcctcccccgcaaagctcaaatacgtcaaccggactgggtcgccctcttcccagccgctggtcgtcggcggggggaagtgcagcgtgaggtgcgtgatggacgaaaacttggcgacgcgcacgtggtagggcatcgcagagggtgacgcgacgaggtcgaacgactgggtcggcgtcgttgccgagaggtcggaaaagtcgggcgaagcgttggcatacttggagagaaaggcggaaaagggggaagtcagcaacgagtaggtgagcgggtcgcaaggtccagcggccggcgcaccacatgcatcttgtccggcatcttggcgtcgccgccgccgatgcggagcgtgattgaccggagcttgaccgtatcggtgaacggcactggagcaggccgcaggcgagcaatcctttctccagtcagtctccaggtggcaggtcggccggcatacgcacgccgacccgtctcggcgcgcagcggcagcggtcacttgcttcgcagacaaagacgagcccgcagacgcacctcgaatgagcagctcgccgtcatcttcgctctggcagtaaagcgtgtcgtcctcgagctggtcccagggcctgaggcgatggtcaaaggtcgctcgtcagtcgctggtctgccgggcgggagggtgacgcgcagggtctgagaggggagagggcgggaggctaacttgatgatggccttgcccatctcgtcgctctcggcattcagggcgacgacattgtcctctgattcagagcacggacacagcctatgtcagcacagagctccaaactcgatcagagcaaccggacagactgtcgacaacttggtagagcgactgctgctcgccggcctcgtgcgtaaagtgctcgtgcccattctcgtgcccgcagtcgccgccgtggcctccagctcctcctccgctaccggcgctgtgcgagtgtcctccgtggtcgtgcgagtggccagacatgctctcagattgaaggcttgactgtgctagagtcggagatgcgatgggttcgagggaagggccgggtgagcgttgcgggtcagctggcgactctggccgacctggaccttgagctcggtcgcactgttccgacgtcgacccttctcttcgctccgcatgtcctccttctacctagtcctcgtcggcccactcgactcgccgctctcgcagcacactttctcaaccgcccggccagcctcagtcgtctcgacggcgggacctgtgggtgcgagctcgagcccggccgcctacgctggccagctcgcgtcgtcgttcccgtcgtgggcgtcgagtgcaccgcaagctgccaacagcgccaacacgagcgtcggcggcaacctcgcgagcatggccggcgtccgaaaaccgggtggggcagctggcggctacgacgagggacacctgaagcagatggcggcccacagctcgctcgacatggtcgaggatgcgatggtcggcggcagcatgtcagtcatgaccttcgagcctgctccaccgtcatcatctggactgatcctcacactcgtgccgatcgtgcaggtaccttaaggcggtcgaccgattcaacgagtggacgatctctgcgttcgtcgcgccctacggtacgtcgcgcccaatgccgacctgtcgatgcctctcgccatgctggctgacgcccgcccttccgatcccatcagtcaagttcatcttactgcacgaaggccgcaacgacgacggcatccgaaacttctttctcgacgtctttgaggcctggaccaaggtgcgtcgccgctgtctagctgcgtcttccaagccatccgcgtgcgagaaagccgagcgagtcggctgacagcgcctgtggctcgacgcctcctccgcttcccccttcgcaggttctcctgaacccctttcagcagccgaatgagcctgtcatatcgcccaactttgataataaggtcaaggcggcagcgcgcaagcacttgtgaacgcgctgcgcaccgtctccgtcagcccatcttcacgacctctctacgacctccatctggcctgtccgcagccatgtcatgaccaaatgccctccagtctcttgagatgtctgtcagccgaaagacgaagcggctttatatggttgcttcgggaggcgtgccctgcgccttggctcagacctcggttcgcgccgccggccacgagatctgcccctcaacaccgaccccttgttccaacctcgtcgcccttcctccacctctttctccccttaggcaagcgctgcatcctcccttacaaggtcgctagagccgagaacccctcagcatcttgaccgccctccccgccccgacgcgagcatgagggaggccaacttcgctttcccgagccagaacaggtgcgtcgcctgccaatgccctagcctcctgccgtcgctccagctcgcatcggactcgttttgctgacgctccttcgctggcgtgtattcaacagggcctgcgtgtgcatcacgagcgcgctgtatgaccggcgaggtgcgtctgtcctgctcgctacccgtcagatgctcacgtggactgggaaggtggcacgagctcggccgcggcgagggccgggcgtccagctctcagcagtggccagggcagcttcccttctgagcagctcagccaaggcttgcagcagctctgacattctcagagaggctgagctgctcaaagctgcgttgttggaggcgacgggagccgggagatgtccagggggtttcgtgcgcaggaggacggagctcagagagggggagagatgcgaccgcaggcggtcatcaaccccagctcctcaccgccgaggcggcatctgcagagctagctgctgatcctgccacgacgtgctcctcgaggcccgccgcttgcggctctgcttaggagcgccgagtaacgacgaagctgcgagggccgccgaccgatgctgactgtgcgccgctccgcctctgccatactcaccgtcagctctcgacacgacggccgccctcccgctcctcaactcgctcacgcatctgacgtacctgacgtcgacctcgcctcggatccgtgagatcttgacgctggacggcgggctcgagcggctgctgcacatcctccgcaactcatcgatccctcggccgcctcctccgccgcccgacctctacggcctctcggttcactctgccattccggcctcgaccggtctgctctcgcctgatcgggccgtcgcctaccgcttctcgctcgcgttccagtgcgtgtcaaacgtcggcgtccgggggagcgagcagatccggacgcgcgtcgtccaggccggcgtgctcgacgtcgtcgcccaggtgcttgaggtctggctgcgctcgcgcggcatgagtactgaggcggggccgagcggctcgggtcagccgctcaacctgcagggcaaaggtgacgcctcgggtgcgcggtcgtcgaggcgcgcaggcggcccaccatctgcggcactcgcggctccggttcctcggccaggagcgggcggcgtccagatcgcgagctcgctcaacccagacggctcccttgccgttcatcggcaggtgggaccccctggcgggcccttcagccaggcatcgcagccttcatcggctgccagtggcaccggcccttccccccgaccgaccgcggcagctcccgcgcccgggccatcgctcatcgcccgggcgtttgccgcccacccagagtcgacagctggcagcagtcggccctcgtcgacgacgagcgagcagcgcggcggcggctcctttctcaattctggcgacgagacctcggtccacagcgccgaggtcgatatgggcgacgagagtgcgcgcgacctggcagcgctcgccgcctcggacgaggagacggcccggcttgctcagtcggcgtcgagcctgctgcagtcgatggcgagcagtacgccgttcgtcgcgtcgcgcagcggcatcgctccagagacgacgccccgaagcggacctcagccactttccgcgcgctcgccggcagcgtcgttcgctggcggccggcgaccgagtcccatccgctcaagcagcacgagcacgatgggcaccgacaccgaggccgcgagcgccccggtcccggttcagccgcgacagctggacaacctctctcggccggctttgactggcaacgccagtgaggccagctcggcaggtggcagcaacgtgtcgacgccgatgggaacgccaaccgggactggcctccgcgagcgcagtggcacgcttcttgcccggccgaccccgacagcgcaaccgccggcgcgacgacgtcggcgcgagcggacctcgacgccaggcaacgacagcgcgacgaccggcggcgaggacgacggtgccgacatgcttgatggggaggacgatgaggcaggggctggggtgggcggcctgcgccagggtgatggaggcggcccggtcgcaccgcccgcgagtcaggaggtgaacatcgtccaggaggaggacggcgcaaccgacatcgagggcggcatggacgacgcgatcgaaggcaacatggacctccagatgggcgccccgcctggcgcgcccggcgcggccaatacgcccggtccggcgcccgacatgacgcctcgacaggcatttctgcccatgacggctgccgtgccgcccgtgcagacgatcggcccgtccgttacgtcgcccacagcgcagacggcggccgagatgacggccgctccgacggtgacgcccggccggctcggcacgacgattggcgggtttgcaggggctgccggcatgacgacgccggcggtcgccgcgctcgcgacggcccaggcgacgcagcggacgctgcgcgatctcagcctcgagggcaacacaatgagcccaagcgagacgacgtaccgggacgacgacatcctgctctcgctccagctgctggcctacctgtcaaagtacccgcacgtccggcaggcgttccacaagccccggcagccgttccacccgaacctcgagctcgacgagcacaacccggcaccgctgccgatgcggccggccctctccgatacccccaacatcttttcgctcgtcgagcgctttacgttccggccgtcgccgagcgacccgacgacgccccagctgccggacgagatcgtttattgggccggcgtcatcatgcgcaacgcctgccgtaaggacgagtcgcggggcggcatccgccagtgcgccaacatgtcgtgcggcaagtgggagacaagcccacggcagtttgccaagtgccggcgctgccgcaaggcaaagtactgctcaaaggagtgtcagtccaaggcgtggtccgagggccaccggttctggtgctcgtacgtcgcgctcttccgtctccttcttctttctaaggctgaagatccgctctacctctctgctgcagacaacggggcgagaccgaggcgccagcggccgaaagcagcaccgcggcgcagcccggcacgctcggcagcctgaccggcctccagaacgagggccagcgggcgggagccgaggggacgacagccggccgtcggcccatcggcgccggtcagcatgccgtgccggccggtgctcggccgccccggccgaccgcaggcggtgcggctgtgcgaggggcaggaggagagccgtctgacccttccggtgagacggctgctggcggccggcgtgccaacccgccgatcagcgtccgcgcgccctcggtcgaccacacgatggacgtcgaccccgacccccgccagcaggctgtcccgccgacgccgcggccggcgcccatcgtgcgcgcctcgacctgggcctcgacgtcgggcacgaacccagcgctcggcaacccggaagacgtcaacggcgtcccgctgctcgccccgggctcggccacgttccgcccgccgcaccagagccggacctcgccccagagcgtcgcgaccgacctgctgaacactcacgccggcacgcgcagcctcgcctcgccgacgcatccgcggcaggctggaccctcagtctcgacgagcggaggcagcggcggccactcgagcagcggctcggccttctcgcggattacgagcgccctcccgcggctctacaactttggcagcggcggccacgcgcacgacacggcggctggcggcgcgcacgatgcagcggccggcaacggcgagcattcggccgcccgtcgctcgctcttccgcgcgctcgggtcgtcaagcacgccggttcagccgtcgcgcgatcggaccgagcgtcgcgccccggcgcccgcattctcgcagcagcagcagccatcccaaccgccgccgccgcggtcaggctacgacgacgcagagatgacaggctgaggcggcagctgcgagcccccttccaccctacctgggcggcgaccgaccggacactctcttcctctccccttgcattgccctctcctcaccagcacgcgccgcctgtacctttgcatcgactgtgcctagcctgccccatggccatgcagatcgaacaatgtcacgagacctgaaccggtcgtggctgcccgcctgtgtcttctctcgtcgcctgctcggagccgaaggctggccgaggctcggagggacgagcatctgcggggctccgctcctcagcccaccgcgcatccgacgccgcgtggtcgagctctccccttcgcacgacgtcgagcgagcaagagcaggttgctgacgctcatcagtcatcccctcccgtaccacatcccatgcagctctcgagcctgctcctcgccggcgctgccctggccgctgccggcacgccaccgctcgcccaggctgcatctgtcaccccccgccagcgtgcgttgcctcccactggccagctcctcgtctgtcgaacaaggcaggctgatcaaaacctcgtccggccgacgctccttcttcaaagactccaacaccatctactactgcgagcggtggacagtcgtgcgtctcctcgacctgctccggaaacagcctctgttggagaaggatcggtcgaggcagcctctttcactagccgagctggccgggtcgccttccctgacccctcgcccagcgtcgctgatgctcgctttttcgcctctcatccttatccgctcggaaccaccaggaccgatccttcatccaagccccaggctggatgacttggaacgtcgagatctggaacacgactggcaagactggcaatggcgacttggtgcgcgcgcgcgcgcgggccttgttgagctcgccggccgccccatactgacatcgtccgacaccttaccgactcttccgcgactaggtcgagctcgtcacgacagattttaagggtgaggaaggttctttggatgtgtcagaatgcgcttccgctgaccaccctgaggcgacccgtcaggcacctcgttcacctgggtcccagaccttccggccaactcgaccgtgtgcgccctcagcctgccatctcgcagaagtcatgacttggctgctgacagtcctcgtgctcctctctcagccgcctgcgcttgacgcctaacgacccgaccggtatgaacagcttgttttccgtctcgtttgaggcgtcaatccagccgacgatgaagcgatgcgagtacgtcctcactgtagaagagtcgacgagtcaccaacttgcctcctgactatccctcgctgtacactcactctttgcgaccccagccagtcaaagtgagtctgctcgttcttcctttcgtcgacgccatcgtctcagcgtcaggctcgctccctctcgtccacctgctgaccatgaccctcgaccattcgcgctcactgcactcgcccctgacagactcaacctcacgtactctcccgcctcggttctcgctgtcgaggaacctgtcaagggatcggacgcgacaccgcccttggccttgacggtcggttgggcggcggcagcggccttcggcggcatcggcatcctctcggcgctcatttgatcgcgtcgagctgaggtggaaagggctgcttaggtgacgagggttctcaacaacagcgtgcagcaagacggcgagagactgcggtctccctgggggcgggggaggaggttgcagaggggtacgagaccattgtggctctgcgtgggctcggcttggtagcttgtatatacactcacaacacaaccctcacacacctgcaaaagacgcgtcttgatcaggtgcaccactctcgctgtcgaaatacgccggccggccgccaaacaagactgtcggccccgccaagggcgttgctccgactctcgccatgctgtccctcaacccagtccggctcgcctcggccccgaggtacagcatcgctcgaccgagtccggtccgatttccgaccgaggattaaagggcaacagtcgtcgctgaccatctgtgttatcctcctgaccgtccatcacctctttcttgaccccttctgcgcctacttttcaacatgcagctcccgatgcctacgcctctcgccctcgcggccatcctatgctgcgcctccaggctcgcatcagcgacgtctctggccggctttgccaacctcgcatcccgagccgatccgcccctcttttgtgggtcgccttttcgacccacctcgactctcgacgacctctgcccctgagctgacctcgagccgacagccgtgctcaactcgtccgcaccacgccccgagaccttttactgcgagcccatcgaatttgtgggttgccctggcagaagatccccatcctttataaactgtcaagctcatcctgcctctctaatttttgcctccagagctgggcgactgatggcatgtcctcttctgccttgacgaccaacctgtccatcgctgtctttgacgtcacactcggtcggccgggcaactttgtaagtcgtcgtcgtcatcggtgtctcaatgcacatgctttagaaagacactgactgcggcaatggcccttcgcacagaccttcctgtaccagtccgtgacgggatacaacggaacctcttacgtctggacgcccgacgtacccgccggcaagcaatagtacgtctgcgcgctgccgagagcctgccctggcgcttgctaacccgcattgtgtgaacccgactgtagctcgatgcaggtcttcaactcgacggtcgtcggcactcgggctaacggcgacgctctctacgacccgaccagccgcaatatcttgttcataagctttggtacttcgtttgttaacacctcaaccaaggagtgcaagtgcgtggtttgcccctcgtttcgcctcttactgactttgtctacttcttgttgctgacccgagatcgccaccctcttctcgccatctccacccgtcttctctcacgtagccagtcggcgtgcgtccttcacgcgtcctattgagatctgctcgcccaccgactgacgttcgccccatgttctcctccgacaccctagcctgcggctcggctacgaccctgcctccgtcgtctcggccggcctccttaccgcttcatcctcggcggcaacatgggccggtctggccgtcgcttttgcagcgctctcgattgtatgagaccattaaatctgcaccagctgcttcagacgcgccagtcgaccgtccgtcgtctcgagacgcctctggggagagaggaaaaacgtcaaggtcgactagggggcgacttgggccgtctgcgctttcaattgcttcttctgcggctcgccgagatcgtcggggacaaggattgccggccgttcgtttgacgctcggggccacggataggcgacggcgagagataaccgcacggatcgtgcagacgggtgcattctggccggagacgcaagccaattgctgaacgctgagccagggattgagccgcaagccgtgcaaagcaacagccggccggggggaagcctcatcctgtcaggcgtgtgcggacgagacctcgcgagaagattctgacgagagagtgatcgaccgactggctgcgctgagcggctggacggaagctcagccgttcgctagccccggccgcaggcgtcctcgtcatgcttctgccggcacgcaagcgaacaaacgccctcgccgcagagctggcaggcgtatctcaacagactgccacaggggaggcagaacttgcgcggtgggtgttgagagggccggacagtggagtggatatagggctggtgaggctgaggaaggagacagggcggaaggtcaggtcgaaactttatcagggagggtcagggagcgacgcacctggtcagccaggagctcggttagcgtccgtcggttcgaaggcgcgagcaacgtccggaccgagctcgtcatcgtcgtctttggcggcggcggcggcgctggcgctggagccgtcgctgccgacttggctgccgatttggtcgtcgctggcgtagggcgtgcccgcttcgacggccgaggagggtcatttacgtccatgtcgtcatcgtcgtcggtcgcggcggactcagcggatgctgaaggcttgaggggggccggagcgagactgaggccgtctttgaactctttgaagggcagatcaacaaggtttgtcttctgcagacgcgaagggcgagcagagaggggaaggaggcacgcagcgcgagaggaagggagagtgggtgagtcagtcccgaggacgatatcagggagagatgcatacgcagagaacatctgatctccatgcctgcctcctgctccaccgaatggaagcaaggcaccaggaggcccgaaaagggctgagggacgcacctcgagctggtcgagccggcgcctgacgcgtcgctcctcggccgtggtcaacctctgctgcatctgcctcgcgtacgaccccccatcatcctcgcctcctgctaccctcgcaccgccgtcggcgaagtggagggcgatggccgttagtgaggctcgggctgcctgtcgcgtcgaggctgccggacgagggatcaggagaggatggtcagccctacgcacccctgcctcacagcgtcggtcgacgcaccctttgagcgcgaatgcatgctctcgctgtcgagcagttgcgagcttggtcgagagtcaagggtcgaggtcgaaggtcaaggacggaggacgcgtcgcgatcgagagcggcatcggagagtcgatcgagcggcgagcgtgtacgtcaagcccgccgttcgtcccttctcctgcttcgacctgccaacgctcacccttcctccttgatacgacatgtcgctctggaccgcctccagctcgctcgccgctacccgtaacatgaactcgagagcttccgccagctcggccgtcgcattcggccggcgccagctcgcgaccgcgaccaagccgtctgtccctccactcggctgcggcccgcacccttgtcctttcgctcgctgaccctccgctgcaatttgaccgcacactcgatgatctaggccgacaggtgcgttctcttcttcatagcagctcgaactgctcggcgatccgagtgaccgcagagcttgcgcccgagtgagctcgctcggctgagggcggcgctgacgttacgccctcctccgattcgctccgtctgtgcttgcttacagccatcgtcctgatgaacatgggcgggccctcaaccgtgcgtctccatcctgacgagagcgccccctggtctcatgcggaactgctagaaggacgctgacgccgctgctcacccctccgcgtgcctacctgcgcgctcattgcccattcgcagatccccgaggtcaagcccttcctcaccaacctcttccacgactcggacctcatcccgctcggcccgatgcaaaagtacatggcgccctggattgcccggcgtcggacgccgcagattgagaagcagtacaccgacatcggtggcggctcgccgatcggaaagtggacgaagctccagggcgagatgatggtcgagctgctagacgagctcagtccgtcgacggcgccccacaaggcctacacggccttccgctatgccgagccgttgactgaagcctgtctcgccgagatgcgcaaggacggcgtaaagcgggccgtcgcgttcactcagtacccccagtactcgtgctcgacgaccgggtcgtcgctgaacgagcttcaccgggcgctcaaggcgacgaacggccaggtcgagggcgaggagccgatcgagtggtccgtcatcgatcggtggccgacgcagccgaagctcgtcgaggtgcggtttgcgctgctcaacctgccgcccgtttgaagccgctgaccggaagcttctctcgctgtatacgtcaggccatcgccgagaacatcactgctaccctcgcctcatatgcgcctgagatccgctcgcgcgtcgtcatcctcttctcggcccactcgctcccgctctctgtcgtcgagcggggcgacccctacatcaccgaggttgccgcgaccgtcctggccgtcatggccaagctcggcaacacgaacccttaccgcctgagctggcagagccaggttggaccatcgcgctggcagggccctcagacgatcgacgccctcaagggcctccatcggaacgggaacaacgaggtgctgatggtgccggtcgcgttcacgagcgatcacatcgagacgctctacgagctcgacatggagtacgggcccgaggccaaggaggtgcgccccgctggctcaaggaccgctcaactgcaagagctgacagcgtccttctcccttcacctgcagctcgggatgaacattacccgtgcgccctcgcttaacgactcgccaacgtttgcccgtgcgctcgccgacctcgcggccgaccacctccaggcggttggctcgggcgaaaagggctacacgagcgtccagctcgggctgaggtgtcccggctgcacgaacgagcgctgcggcgagacaaaggcgttctttaagaatggcgggcggacgctggccgcctagagggatctctgggaatggacctttgttcggcttgagtcttccctgccttaagatgggtcgcagcgacgtgaagagacttcgaaaggcaggtcagaactcgccagctgcccagtgcagccgggtgtgtcgtacgtcaccttccggtagatgattctgtcaattgggcgaccgctttcatcaatggccgcgcgcgcgcgtccgctctcatttcccgcgcgtctctctctgtcgcctgccccccacctcattcctctcctctctcgcgctaccccctgccctcccctctctctcccgccctctctcctctcccaaactcaactcacacacacaaccatgtcgaccgcctcgctcgagactccctccaaggcccttggttcgatcgacctcgcttcgacgccgtccaagccggcatcgtccttcgccgaccggctcggcgcgtcgtccgacgagccagaggcagccgccgccgagggcagcaagcaggtcctcaaagtcgcgcccgcaaagatgacgcgggcagagctcgaggctcgcttcgtcggcgacctcgactgcgaggagtgcgacgagccgatcctccaggagacgtcagtccctttcccttccttctctcgatcgggcgcgggaggcgcgtcgagagcggcggtcgtccaacacgccctcctcgcgctccacaaacgcgtccatccctcgccacttcctccttcgaccgttctttctcttccaaaggcgccctcccctccctctcctccttcttggactgtgccttgtcagtctctttctcgttgctgacgaagtcgccctcccgtttcttaataaatagcaagaagcgcttcgtcctattcccgatcaagtacaaggagatctggcaggcttacaagaaggccgaggcctcgttctggacggccgaggagatggacctctcgaaggacatgcacgactgggagaagctcaccgacaacgagcggcacttcatctcgcacgtcctcgccttcttcgccgcgtcggatggcatcgtcaacgagaacctgctcgaggtgcgtctctcttctgctcttttcccgctgctgctccaccccatcctgacatatttttatctcttcctgctcgcagcgcttctcgtccgaggttcagtcggccgaggcccggtgcttctacggcttccagatcatgatggagaacatccactcggagacgtactcgctcctcatcgacacctacatcaaggagcccgaggagcgcgagttcctatttgacgccatcgagacgagtgcgtatgcctaccgagtctgccagctggccatctgctccttccgtcaactgactttcgctcgcccccccccccccccgcagtcccctgtattgctaagaaggccgactgggcgatgaagtggatctcgagcgagacgtcgtcgttcgccgagcggctcgtcgccttcgccgctgtcgagggcatcttcttcagcggctcctttgcctcaattttctggctcaagaagcgggggctcatgcccggcctgaccttctcgaacgagctcatctcgcgcgacgagggttcccacaccgactttgcctgcctcctcttctcgcacctcaaccgccggacggcgccggccatcatcgagtcaatcatctgcgaggcggtcgagattgagaaggaattcctctccgaggccctgccagtctcgctcatcggtatgaacgtcaagatgatgtgccagtacatcgagtttgtcgccgaccggctgcttgtcgcgttcggcaacgacaaggtgcgctcggtgcgggtgtaacttgtgtcagaaacgacggctgacacctccctccgttcctcaatccttctctcccttcttccctcccctccttccctcccctcctctcctctctctcctgcgctccgactttgtcctgctcgagccggacacctgggcaggcccttgcgacttggagggcgcgccatcgacctcgttcgacctcgctcgggtcgatcttggtcagccgcaggctctggagggggcccagtcagtctcctgggtcagctcgaccgcccagttcctccgggtcagctggctcttggccgccggcaccctttccagcgctggatgggtcgaggggaggtcaccacgacgagtgggagtgttgaaggaagagcgtcgtggtagttttgcgggagggtcgccagcgccggcgcgctgcagcgcccgcccgcgcggcggcgccggaagttagggttacgcttcatcgaacgtaacacgctttacctccctccgtaacatcactctcttgcccttacggcttcctccctcatagcaattttcaaggcgcaagtcctcatgtatcttaagcgttcacccgactgccttgtcccctgcaaggccgtgtcgttcaacacccgctcggctcggcggcatgggcatcctctcgcacgccgaggtctcgccccacgctcgagctgccatggccgagtcggccgacgcccagctcaaggtcgccttgaccgatgccgacgatcttgccgaggtcgaggacgatgtcgtccagccgacgtcgcagcgggcccggtgccagacggccttcgtcaagcgtcgcgagtccctcctggccgccctgccctcgactgaccgagctgtcgtcctcgacaacgcctcgcccatcgcccggcgctggatgtcggccatcccgttcgctgccaacctgcgtctgacgtcctcgacaacgcctcgcccatcgcccggcgctggatgtcggccatcccgttcgctgccaacctgcgtctgacgtcggccgaggtcgccgctggcctgtcgatccgcacgctctgccccggccaggacgaccactgctcgcattgctcgctgcccaacgtcgtcggccatgacgacatctgctcggcccgtcccctctggtgtgttgctcgccacgagcacgtcaaaggtctgctctcgcgtcatctcggctccatcccccgcactcgcgtcgcgctcgagcctttcgtccctggctctcaccagcgcacggacttgcgcgtgaccggccctggctcgttcggcggtcctgtctccgagtacgacgttgccgtcgtgtccgcggcgaccctcgctggccgtgatccgatcggctctgccgacctcgccggccttccgtcgtcgctgctgcctgctggtgtctctgccgacgctgcgccgcgtactgcttgcgcctctggttctctcctcaaccaactcacttcaaccgagaaccaaaagcgctcgaagtacgacggccggacgtcgtctcccttccacccgatcgtcatctcgaccggtggaactctttctcctttgactgttgctctcttcgctcactggcggggccttatgcctcgctatggtctcttctctcgtctcctctccctttctctgctccgtgcccgtgctcgcttcttcgccttttaggcgaagccccttagccacttgaactccttctcgcctccaatgtaccaccgtctatagcgcctttgaccctctgctcccatcgcatgccccgttaaaccctaaccctaaaagaaccgctttcgtctgtttcattttcccttctcctcattggctcctctctcttccgcctctcttccgctccgtcttccctcaccctccgcttccgtgtgcccgcttccctcttccgtagctcttcccttcgcctctctctcccccctctcgacgactcccctcctccgtccactctacccgtaggcagccgacccgaccctaccccgttcgtctctgtccccgtcccgcctgtccttgaccgtgccttacactattcgatgctgcagtaaccctaaccctaaccctaaaagtgctcgccgtagcttggcctgtgtcttctccgcccgcacatctacggcccgcttcaccctgtcggcaagcgggcaagctcacctgctgctaacgtctgaacaaacgacttgccgggaattgcgctgtttccctcttttgtgcgccaagctaatcttcgaccagtttagcgaagtaggtcatcccaatcaaaacaggctgccgaggcctaagctgcccgagctgccgcgatcttgctcctgaccctcgacctgcgccgcatgctccgcatcaggcgtctcaacgccgctgctttgcccggatgcgccgccctcgtcgtcaccggctgcaaacgagccatcgagcagccggcggcgtttgcgaccgccaccttcgccgagatcgacaatcaggccaaggtttggctgggcgcagagagtcgcttggccgccgatgtttgaaccttccattcgaggcaactggctgcccaagagcgagggcgcgtccgcgaaggacggcaagtccggagttggcgtgcgtcgggatggagaacgaaatagccgctgcggcgacgtgcatgccggtggcggcgtgccgagagagagcgacagggtctgatgcaatgacttatatgcgtcgactgagtcccccctagtgacggccatgtccgagctacccaccgccgcctgctcgaatgagcgctcgaccgccgcgtctccgtgttctggaaggctttgtttcaccggtgtcgaagcgacgactgacccctccgctgatcgacctgcctgacttgcggtggagggtgacgcaggacaaggctgagaagggcaggtcggccgagtctgacctggaaggagcggcagaagcgcctgcaaaacgctcgagtgggtgttgagggcgtcgataagcctctacagatgatgacgtgcagagcagagtcagtcggagcgtcagaaggaaaagactggcacggggcgcacgtgctcaacgatgagcgacctatgcgcaagctcgtcgacgcgactctcgacacggacgcaggtttggccaatggagcggagggcgtcgtcgactttggccgagagagctgcaagcgagtgctccgacgcagcctgcgcagaggtcaggggctgcagaaggtcggctgtatgcgcccttgtcgacgccgactcgtttccgactgccggcggcgagcacatgagacagttcagcacgcagtctagatctggagaagaagaagagaggccattgacgttgacgttcgagcgaagagaccgtatcggcccaaccagaggtgagctgcgcaacctgctcctgctgctgacggccggcgtcgacgaggttttggagtgggatcgcaaagtcgtgcagcatgttcgacgtctctgtcggggttaagccggttttcagcctccagcgagagagactggctcgatgtacaagactgacgagtgagcgtcgaccggagcagcccgacgtctgcaagagttgaaggcgaggcgacccgagcgatgtggccgtgctgctggccgatgatttcggcaaggcgatccatctggctaggaaggtcagatgtgagagtgaacctgcggatgagagagagggaagggcgggtccgcttaagagagggtgagttcgggtggcgatcagtggtgagcgagtcgaagcggcggccgcgccttcacctccggttttctgtaacctcataaacatctcctcaaccgccgtccaaaagccggtacacctcgttcagctggccgctgccctcaaggctcgcgagcatgccgtcaaagctgtcaaagctggtgtcctcgtccgccatctcctcgcccaagataaccgactgggttgcgacgagtggccgaggcgaagccggaacccgaccgatgggcgcaggagctggagcggcgacctgggacggtggcttgaacggcggccggaagcgagtgacgcgaccgatgccgctgctgccaatgacggcgctcgtcgcacgacccatgccgagcctgactcctccgatttggctgttgggcgctcggtcctgcgacatggcgaggtgtgggacggtcggcgagctgattgagtagtccatggacgttgcctgcttgagcggcgagggcggaaccttgcgcttctgcggtgagaccgctgaccgcgcttttggaggcgaccgtgtgtgtagaggagcagacgcaggcgcagggccgaccagagatggaagccctgctggctggtgcgcagtcgagacgatcggcctggaatgcaagaccgctgcggccggcggcgtcaagagctggaccgtccgcttccagtcgatgccatcgtcgtaggccgatccagaggacggctcctccacttcccagctgggagaacgcgagcgccgtctcgtcagagctgtgcccgaagacgtcgaccgtttaagccgcttgctcgccggcggctcgaccgagcgatgcgagtcgttcggtcggggatcctcggccacatcgtccaggcgccgcccgacgccggcgttcgacttgcggttgcggccagccgaagagctaaagggcagccggtcggcgctgacagaccgctggagggcgcggcctttgtccttggccgccctatgcgcagaagcagccgcaggcgggccgactgagggggagggcgtaccgcgacgggcggccatgcgagcgtcgacctcggacaggatctgggcgagatcccagctgttttcgtcgcctgcgtgcacgagggacgttgacggtccgacggcgccgaagccgccatgttgcgcgacggccggtttgacagcgagtgtcgcacggccggctccggaggccattgcatcaacagctggcccgccgagagcgttggccgatcgagcggagagcagactggatgcggacgacgtcgagcttgacgcagagccgttgtgccgaggtcgtcgagtgctcgacccgcagctggtgcctgggttcgacaagatcgagctcgtgcgccgaggcttgagctgttgaggtacggcgcgaatgggtggcggagaaagcgggcgctgggttgggtaagaactctctggacctgaggaacataggttcgtgtgccgtcgtcagcactcctggtcgtcgaggagcagctcgaagacgctggcagggatgcgagagaacgcacgactccgagcggccgcgaggatctgagctcggagcgcgtggttcggtgagccttgccaagcaaggaccgatggctgtgtatttggaggaggcgagagcggccgattgaagggtgaagacgaaggtgacatgtcgaggagcgagcggttagaaggctgacggcagcgacggaggcaagcacgtgagggtcagccgaactcaagcgaacgggggcttcagccgcgaggccgatagaacgaacgggtcaatacgcaagcacggtcggcagttgatgctgtcggtgcagctcagacgggcaagagcgaccctgcggtcgagcggtcagtcgaggatggtcgtttgccgaacctcgcagctgccagctgccgctgagctctgcaggggttgtccgactgccagcggagcgggatcctttaagtcagcgacactgcctgacgatcaaaagctctttaggtcgagcaagaggccgtgccaatggcgtcttgagccaggcgttggcggcaatagatgcttgaagagggtagcgggaggacgaggtcgacggacgggcgaccggggtgctggagctggcgccgcgagagggctgtgtagggccgagccagacgggatcgagacagcgaggccaaggcgtgttgagacgagcttccagtccagctaggtgtcctccgggaaagggtaggcgggtgagggccggtggcagcctgatcctgacgagagccagcaggtgcgctgctcgtcgcgtcctgcctgcctcgcgcagcagccctttcgagcgtccctcaaccgagaacgagtgctctgccagcagactggcgtgcgtctacaaggaagaagcggatgccgatgaaaaggggatcatgtgatgctagactccccgcctcaggcccagagcgcccgcggatcctcgacgcggagcatccgacggatctgagccgacttggccttgttgatgtagcgggcattcggggcgccgtcgacccgatgctcggcctgcaagagtatcaaggagagatcagcagagattcagagcgagcgcacacgttcgagagccagacgcacgatcaggttggcgagcagcatgtcggccgcgccgtcgctccctgctctgtcgtacgcgtccatcaggccgcggaaggtgccaaattccttgaggacggcgagcgtcatggccggcgtgacgcccttgacggtagcgagcatcttacagagtgtgtcggacggaccagcgcccttcgggatcgccgtgtcggcgcagaacggcaggtgcgaatactcgatgagcctggccaggagggtacaaggagagtcgtcatcaagggctagtggtcttccggctgataaagaacagccgtacttgtagggccgatgagcgacgtcgcccgcgaacgacatgatgtagtcgaccatctccttgtccgtttcgactgtcgggaagatcgcaacgtcagcctcgacagccacgcctcagcgcaaagcaggacgcaccccgggtgatgaaactgctgtcgacgacctgaagctgaaccatagccttctctatgacctccttgctgacctgactggcagcagccgtcaccgctgccgacgccgccctccgtgccgccgcagacccggcctcggtcgacgcctggcccctgacgcgtgcgtcgtacgctttggcggccacacttttttccagcttgtagtatttctggaggccgtggacgatgaggacgacttggcccttggccgtcaagcctgctgccgtccgcacgcgggaagggagcgagagccaagtcttgtcgcggacgtgcgctgccgtctcctctgccgaaaggagcaggatggtcgtcgactcttgctggatgagcgttgggatcgactgaaattgtcgcgactgctcgtcatactcggccttcagctcgcgcttgaagcggaggacgttggcgagcaatccgggctgaaactcagtgagacggacgcccgaatcctcgaaccggtcaatgagctcaggccagatccgagcgacgatcgagcgcgaatcggctgcctggcgagggaggtcgatgatgagctcttgcatggccgtcgtccgagagcgaagtttgttggcctccttgaagacctccttctcggcctaccaacgcacgcattgagtcagaaagttggtaagctcggaacagacgatctggggcacacgccgggacgcaccttccgccgcgccgcctcctctgctttgtcctgtcgcagccgtgctttagccgcagcgtcgaaagcctgtgagcgacgcagatcaacacggtaccagaacaacaagcgctcgctcagcactcacaatctgctcggccgtcttgcgcttgcgctttggcgaaggttcgtgaccggtgtcggctgctgagatggcccgcatctcgccattgtcgctcgcatcggccgtcacgttacactccttgcccttgcctttgcccttggcacgacctggctctggcgccggcttagctcgcgcctttccggtacttgacgctcgccgggcctgcaggtaggctgcgtcgtcctcgacgtcggacgaatcgagcttgtacttcttccgcttggcgccggcctcgggcgccttcgcgctctcgacgtacgcgttagtgcttaaagacctcgaccggcgcgcttcggccgcagccgtcgcggcttcgatctcggccaacatcctcacgagatcgttgtcgtcgtcgtcgctcgcctcggccgcaagtcctcccggggaccagagaccggcgacggccgagtcaactcggacactggggccaggaaacgcatctggcgattgccggccgctcggtccggctagagccccgctttgggacgcgaggggccggtggaggtcgagcggaatggcgaatgccgtgtaagacggcgtgcggctcgagctcgcgtgagcgttctggccggagtccggttggggtcgcagattcagcgctttgagatgaccgctgaaagccgcataaggacggaccggccgaggtgcggaaggcagcgttgatgagacgacctcgatcagctcgtcgtcgtcgacggcgcctcgcgggcctcctgtcgcttgggtagttgagctgataacgccgcagacgacgatctcgtcgtcgtcgtatccgagcagagacctgcttgagctcggctgattctgacgctccctcaagacggttgctggttgacagggaggaggagagcgagcgggagcagggtcggtgcgcgagggcggtgcgagccgtgcggggaaggctgcgaagaggtcttcgtcgtcgtccgagatgtctgggatggttgaacggctcgaggtcgacggcatcttctgcagcctcgaagctgatgcagcaggcagggcactgtcatccagcagacgagagacgaaggacggtcaggctcgacgcgcagggaccgcgcaggaaggaggacgagctcgccgcacctcagtccggccggcggtagctgagcgatctcgtcgtccgagtcgagcagagaaatgacctcgtgcatcttcctgcgagctcgccgagcaaagcctgaggaaggatggagtgaaggggggagaggggctttggagctgtcgcccgtcgtcgacgttggttgggaagacgcgtcgggactgagggcgcggttgaatgaagggcgagccgatgccgttgccctttgatcgactctgctcgcactcctatcttgttcgcaggtcgccctgatcgaatcacgagctgttcggacgagagagttctgcagccaagttcacgagtcgcaaggttgtcatcgcaaacgagccccaacagccggcggtcgcacgcaggcagcgcgcagcatcacgaccgccgacaaccgcaacacacgtcttgcgagggagggcatcgtaaagggctcgggtagcttggatcgatacaacggtggtgaaggtgggtattgtagaggctaatgtatatgagggcaaagtgcgccgggcgacgatgggctgcttgaggcggggttgcctgtcgacgtggtgtatcaggagcggccggcgttgctgctgctcgaggccgagacggcgcttcctcctgacccgtacatgcccttcttgtcgaggtcgcctcgctcgtgctcgtgctcagcctcgtcgtcgtcgccgggcgctcgagggccggcggcgttcttcaggtccttcttggcctgctcgtgccggacgatgacctgctcgacctcgaagtcggcgtcgggcttttcggtcggcgggccgtggaagaaggtcttgccgccgatgccaggaaggaaccagtagacggtagcaaagcaccaaacgccgacggcgacgacggcagcgtagttcatgctggcggcgttggggttgatgtcggccgggaagcagaagataatcgcggcgaagaccatccagacgacctggtggcaaggatagcagatcagtacgccagcaggcggaagatgggcttgcagtcaagagaacgtaccgagacccaggcaacaggacgcgaccatcgaccgaggtagaacggtcccgggaagaagggctcgtggaaaataagccggcacgcgatagggatcatgtacgcaacgtacggtccagtgatagccagggcaaagatggcgctgtcaggagtggaatggaaaagggtcagtctcaaaagcggaaggtgtcgctcttagcagatggacaaagacgtacttgatggccgcctcgtctgcaaagccaagcgctcctagaggaatgcagcaggcgacgacaagccagacggctgaaacgatcgatgagatgcaatgtcagtacttcagtcagaggggccgaaggtaagagacgtactgcgcgtaggcgtccctgaccaggtgtcgatcctgtagaggtactttgagcagggcagggcgccgtcgcggaccatcgcaaacgcttgccgagatgccggaaacatgatcgacgcggtcatcatgaactctgcaagaagaaaaaaggtttgtcagcctttagccggcgagatcaagatgcaagccgcgcgaggacgacgtacccgcgatgcacatgaaggtccagatggcggtcgccccattcttgccaaaggccatcaggtagatctgagcgagaggctggtccgtgtcgttgagcatggcgatgtcggtgcccatcgtcaagctgaggatgatgaggatgagcgtgccgaggccgccggccgacacgatggacccgacgatggcgtacgggacggcaatcgcagcgttgctggcctcctcgctgatgctgacggcgcagtcgaaggagcagatcgtccagacgggcgagaggaagctgagaatgaaggcgaagccggggacgtagccggtcaggttctcgaagtggccgaaggctgagaggtaaggcaagcggcagggtcagctcagacacgaaggatgaccagatggggcaaagcgcactgtaggcgccagtgttgagctgaccgcggcgagcgatgggcaagccaatgatcgtgacgaaggaaatggcgacgttcaggcagactgatggcgtctggaggcgggcgagtagagttgtgccgtaggcgcagaggacgccgcaaagggcgaggatgccgacaaagaggccgaagctcgcaccaacgctcggcgagaagtcagggttctggagagtgacgccggcaaagaagatgcccgagcaggcccaggcgagcgagcacgtcgctgctacgttgccgagaaacgagttgtaggctacaaaccagctcagaaagcggcgatatttggccggcgccaagctgctcgtccagtagaagaggcctgacgatgaagttcaaatatcagcaacggcaaaggctgtcagagacgacaagagtgggccgcacctccagacgtcggcatcgacgacgcgaggtcggccatcgccaagccgatggttgtaatgaagactgtggagataagccagccccagatcatggacaccggtccgccgtaaggtagcgagtagactgcaaagcagggtaaagagtcagcgaccaacgaatgggagtgggtgcggagggcaacgcacagatggtcgacgcgatagaaggtaagacgcccctgaagtgagggagaggcagccgagtcagtttggccggtcagccggtcccgtcgtcgccagcgggctcacatgatgctgcgaggaagaggcagacagttggcgtcaggtcagttgtcgcgctcggagtcgagtcgggttgcgagacgcacctgaaagcgacgccaaacgtctcaaacttgctgaagttgcgcttcagctcctgctcgtagccgagtcgctcgagccgcgactcgtcctggacgaggtcggctcgtcggcccggcgactcttcagaccggacgatggttgacatgggtcggactgcgggcgaggggggctgggctgagactgagcaggcgggcgggctgaggtgagcagctagaggcggcgggttgagttaggcgggtggtcggcgagggtggatggcgaactggcaggcccgaatgttgatggggatagagcccggctggccttcaggagccagctctgttatggggaagaggagcgggacggagggcagacgacagcctcggctgacgccgcacctcttgcgtctccttggatctcgggcttcaaacagccgccaccaggacgtcaagtgatcgacgcttaagggccaaacggcctgcccgcggcgcccggtatctcgaggatgagagccgtcgaggtcagcgccctcgcaggctctcctgcagtcgatccaacgaagaccaccagtccggagcaagacgtgaagacatatagggctctgcctcgtatacatctcgccgtcagtcaaggatgggcaggcgtcagtcgcggaaacaggcatcggtcgagccggcggcgctgcatcgcgatagcggccggcgttcgattagagctggcgcgttgaacccaagccggattagcctggccgggttgttcaggcggaggtctgcgatgcgtcgccggcaggaagagcgtcgttggtccgggaggttgtccgggctccgagggccgcacctataacaggtcagcggttccgacgagacgaagaggagaaccacctcatcgaccctccctccgacgcacctacccctctccagctgaacgctctctcaccaggatggcgccctcaaatacctcgttcgcccacccgctcgatccgctcaccaaggccgagatgtcagtccgcctcgttcttcatggcactgctgggaaggagtagagacagtgaagggcagaccgaacggtggtcaggggcgagatcgggcgagcggcgcgcgagccgtagtgcggccgaggagaggcttcgcctttgcgcctccaacgtccatgcaccatgcctgagggccctcgtcctacagacgatggcgcaggttctagagtcgaacaggagctgacctcgctcgctccgtctgaacgacgacctcctccttccctccagccacgccgccgttgcggccgtccgcgagcatgtccaggccatgcctgcctcggagccgtcgaggcctcagcggctcaacttcaactcgctttcgctctatgagccgcccaaggctgccgtgctcctctggtcgggcgttctgccgcgctccgagctcccggccgacatcccggccctcgtccgccaggccgacgtgagctcatcggctccccctctcgtcctcagacgccgcccgctgactcgtctcgtccttcgcaggtccacatcatcgatccgacgaccggccgctcgttcgtcgctatcgtcgacttgccatcgaatcttcggcctgcgccgccggccaacgctgctggccgggtttcgacctggactctgctcgacgtcgaggtccacccgtcgctccagaccgaggagcttctctgggccgaggagatctgccgtaatgactccaaggtcatcaagagtttgaaggagattggcattgagcccgaaaatgcttttgtcgacggtgcgtgcttctctactagccttcggtggcctgccgtcgctgacgaccctcccatctgccaggctggtgcatcggctacgacgagcgcttccccggccggcgcctgcagcagtgcttcctgtttgccaaggtccgacccggcgataacctatacaggtcagcagactttcaatctcggcgaaagtcagtgcccccgcctgatccaaactttgctcttcaatccagccacccctgcgacctcatccccgtaatcgactcgaacacgggcgaggtgctttcgatcgactacccgccgacgaacgccgcctcggcctctgatccgcacccggcctcatcagcagaggcctacgaaaaggcacccgcccgggagcgctttgcgccgccgatgcggcccgacaactacatgcacgcgcagatgaagctcgacgacccgaacttcaagctacgcgcgggcctcaagccgctgcacgtcgtccagcccgaaggcgtctcgtataggctcgagggccgcgtgcttaagtggcagaactggtcggtccttcatcaattaaaggcgctgctggctctcgctctcgctgaccctttcgccatcccgctcgtaggtcgatccacaccggcttcaactaccgcgagggcctcgtcctctccaacatcacgtacgacgacggcccaaacggcacgcgcccgctcttctaccggctctcgatcgccgagatggtcgtcccctacgccaagacgatcttccctcaccatcgtaaatcggcgttcgacaccggagagtacggactcggcgcgctcgccaactcgctcgagctcggcaagtgctgcctcggctcgatctcgtacctcgattttgacggcattacgaggtcgggcggcatcgcctcgatcgagaacgccgtctgcatccacgaggaggacgccggcctcctgcacaagcacaccgacttccggaacaacgaggtccattcggctcgcaaccgcaagctgatcatcagcttcatctgcaccgtcgccaattgtcagtccgtgttgccctgtctgtctgtctcgccgctctttcgctaaacctgctcctaccttcggcagacgagtacgggatctacttcatgttcggcctcgatggctcgatcgagctcgagatcaaggcgacgggcatcctcaactcgtactgcctcgctcccggcgagcaggctgagaagacgcgtgaggttcaggtcgcccctcggatctcggcccaacaccaccagcacgtgagtcgcacccatgcggctgcctctttagaccaaggctgactggcccttctcacagctcttctcgttccggatcgacccaatgatcgacgggctcaagaacagtgtcgtccaagtcgatgccgtgccggacccggctcccgtcggctcggcctcgaattactacggcaacggcttcatctctaagaagacgctctacaagacaagcaagggcagcgtcaacgactacgacggccggacctcgcgcacctgggctatcgagaacccgtccaagacgcactactcgtccggcagcccagttgcgtacaagtttgtctgccgtgacatgccgccgctgctcgcccaggagggctcgatggtctggaaccgggcgccctttgcccgccagaacgtgcgtttctagcaaaggtcatcttcgaattctttgccggccgcctgctgacctcgctcgtgcttcgccctttgccagatggtcgtcacaccctacggcgagcaggagctctacccgtctgacatccatatcaaccagaaccctggcggccgcgactttggccttcaaaagtggatcaaccgtgacgccgacatagagtgtcaagacctcgtactttggccgagctttggaatgacgtgagtcggctttgtcgatgtctttttaccttctcgcccaaccgctgacctcttcctcctcctctcgcctcgctaggcacttcgcccggccggaagactggccgatcatgccggtcgagatcgttcgcgcgcacctcaagccctcgggcttcttcgacaggaatccagggctcgacgttccgagctcgaaggaccccaagtcgcgcaacgccgacgaggccgtctctgaggccaagccgggctgctgtgccaagctctgagcagaacgtcatgtagatctatagcctcccctgccctcagcttcatgctacccttgtataactctcgtatgcccgtcttctacctttgttgcgacgaggtccgttcagcaacgggaggggcggcagaccatcttgagcgattaggcgactactccccgcaaggagcttatccgaatttcgcctaaattgcaagcagtcggcccggcccggccttcgcaatgcgacagcaccctgacacggttcaggaggagacgacggcatcctaatcgtcctcggtcagcccgagctgccgcatccggaacttggacatcttcttcgtccctccgccgccagcagctggcggatcgtcgagcaccttcagcggcgcactcggggcagacggcggcttggacgagacaggcgtcgcccgttcgaatggcgtgccaacgagctgcatcggctcggctgtgggtgcagcaggcgctgatatggagggggtagttgacgctggcgtgggcttgaggatcgacttgggctgcttgacggtcgtctccggcatcgccgacacggccaagtcggaatgggcgacgatcgcagccggaggcatcgattcgagcaaggtggatgccgagggcacagatgctatcggctccgtcaccatcaccttcggtgcgagcttgcccaccgtcgacctggctgatgcgatgggcgcggccgatgcttgacctcgaggcggaggaagagcctcctgcggcagctccggtggcggcggaggcaagctcttctgatgaggcgcctcgagcaacgtgtcacctgtctgctcgtgtacgttgtccgcgaggtcctctggccgaacgacgacgccgccaaccatgccccacatgagcgcctccttccctgcctgctcgacctcgtcgggccgcgcatcctctccgtcctcaccgccgtcctcgctctcgtctccgcccacgacgagctggccattttcgagccgacccacacgaatggcgttgcgcaaaacgccagtcgcggaaccgcccggaacgagggtcggcagggcgatcgatgacggcggcgtcgagtgagcatcggtgtagaattttgagtcggcgagcgattgctcgggcggcgccagccggacatcgtccaggtccgaggcaagcgtcgcgttgagcgggacaaactgggcggaaggcaagattaggtcagcgatggtatgggttgagcacaagctcgtccggcatacctctggctcgtctccgccgcctgcctcgcccatcccacgcagcaagccctccagcccgccccgcgaattgagcgcgcccttgagccgataataggagacagccgcctcgcgcatcaggagcttctcgtccatgtcgagcccgaggtatgccagtccggcgctagcgccgttgtcgtcgtcatcgtccgagttgacgtcagaaagctcgtaagagccttcgtcgtcgttatcgtcgtcgtcgttgtcgtcatacgcgtcgttgtcggccgtcaggtcgatttcgtcgtcggccggaagaatctcctcgaacgcaggcggtgcaggcggggacgtcgatgttggtcgctcggcgatgtccttgacgagcggctgctttaccttagaggcagtggatggagcagtgcccttcttctccttgcccttcgagccaaaggcggccgagggccgagcctttgtcgcgctcggcggtacaacagccggcgctggcctctcgacgacctggcctttcatgatcgggccccgagggatgtccttgcacttcttgtcgccgttctcgccagtcgtcgcctgcattggcgacgaggcgggtgagcttgactcgccggccgcagcgacggcgggcgacagcacgaccggctcgtgcaggtcgaactcccggacctggtcggcctcggcccattggaccgatttgcgccgctcgggcttggccgggcgcgagactgctcgttgaccgctgctcgtgtcgtcgtcttcgtcgtcgttttcggcgtcggagacccacggcgaggccgtcaagtcgggcagccgccggacctcccgggtggtccctgcccctcccgtcacccccgctgcctcctccgcctccaacagatcgagcagccgctccctctcggcccgcttcctctccgcctgggcagcgctcagctccttcttcggctcgagcggctccggccggtgcttcttgccgacaccgccgtctggcccgtcatcggtagaagcaacgggtatggcaatccgcgagatcggccggccctcctcgtcgacgagctccgcgagcgcattggtagggacgtcgccttctccgtcggcggaggtgggctcggggaggtcgagcttgtcgatcgcggcttggagggcaacgaggtcggggccggtggatccagggctgggcgttgtgtcgacgttggcagtggcggtcgaggccgtagaggtggatgctgacggcgctggaggaggagcccggcccttacccttctccttggcgctgctgctggttggccgctcttccgcagaaggcgcaaccgcttccacggtcgccggcaagcgctgcttgccagcctcttcaagcctacgctcctcctcctctgcctcggcccacatcttctccctgtcctctcttctcttgcgctcctcctcgcctcccaccgcaggaggcagcggttcgaccctccccctgactccgagcacaggagcctcgtcagagagcagcgagtcgaccgcgagccgcagctcaaagagcgggaggtcgtcctcgggcgcacgctggggctcgccagaggggaggaggagcgggacaagctcggcctcgttcgtggcggcgggcttggccggtgagtggccggcggcggcggctgagctgggtgcgggcacattggcctttgacggtgctaagggaagtgagggcgccgtgctggaggcggtagcagtctgatttgatgacggtgctggccggtgcggctggcccgtctccttcgctgtagacgaagccgccgccgccagctcgcgaggagggccagaggcaaccgagctcgagctgctcgccgtcaaagccgaggcctgaacatctgcccgccggccgggagacgctccttcgagcgcctgcagcttgagctcttgcaatttcctctcgacggctggcagcgcgacgaagatcagttagctttcgacctgcacgcgagcaagcgagcagctcaagtgacgcaccctccgtcttgcgcccgacaaagtctgccgcctcacgcgcggtcagatccgcccagtagcctccgccgagatggaccttgacgtcattcgtatggacgatctcgccggggactggatggcggcctaagggtcaggcggcggacgaggtcgaggacagaagaggagacgcacctgaagcgcgcgggccgagtgcgacgtcatgcggccagcgtgtgcggtcggtcagccgacccagtcgtgcgccgagcgaggcaaggccggcaagttcgagctcgagcgacgaggaagacgacatgctggtcgggcaagagcgacggtcagcgccggccgactcgaaatcctgggagggctgctgctgctgcgcacggctgggccttccctccgacgcaggccctgtcatgcctgctgtctgctttcatctcatccttctcacccgtaccaggtagccatctagcgccttgccgagcatgccttcctcactcgacctcggcacgctcagctcgtccggccagtcttacactctgaccggctcgcatctctcgtcgctcgctcgcatctcgtccgacggccggctcgtcgtcgacctcaatctcctccatgaccggcggctgcccgagctcccaggaggctacgcgcaggacgttaaggagccagatgtcgagcctgagcctccagcggtcatggcaggcgacgagaagcacgcgggcagcagcagcaggtgggagggccgcgtgccaaagctcaacgtcttgatcctcatcgtcggctcgcgcggtacgcttctgctcccgtcctttgacccttcctccctctgaaatgtcccagctgacagtccgtccgcgccggcccgtcaggtgatgtccagccctatgtcgcactctccctcgctctcgtcgcctttggccaccgcgtccggcttgcgacgcacccagacttccgcgacttcgtccacacggccggccaaggcaagcttgagttccacgacataggtggcaacccgaaggagctcctggcatggatggtcgccaacccgggcttgcttccttcattcgagagcctgtcgaacggcgacgtcgggaggaagaagaagcagctggccgaggtacgtcgccctgctcgcgccttcctgctcctgccggtcggctactgcgcctcgcccacgtcatccacatgcgactcgactgctcttcctcgcacgctgtcgctgaatagccctctctttcttctcttgcctgccgtcggcacgcagataatggaaggctgcttccgcgcgacgcacgagcccgacgagcgcaccggtcgggcattcgcccccgacgcgatgctcgccaactcgcccgccttcgccgcaattcaccttgccgaggctcttggcagtgcgtccgattcagttccatgaagcaagatctactgacgcgctggctgatcttcatcacttccctctttccctccctgcgcactcgagtccccctccagctgacgaatcccttcccctggagcccaacgaccgccttccctcacccgctcgttgacatcgcttcatccaacctacccacaggactcaccaacgtcctttcatacgccctgtcggagaactttacctggctcgggctgagcgacatgacgaacacgtttaggacaaagacactcggcctcgctccgctctcgttccgctctggcccgtcactgctcgaccggctcaaggtcaggccaagcatctgcagtctacttctaacatgattgctggtttcctggatgctgacctctccctcggcgcccacaaggtaccctggacatacgcctggtcgccctcgctcctgcccaaaccctccgattggcgcaaccagatcgacattgccggcttctacttcctcaacctcgctgaaggctacgagccgccggccgagcttgcggccttcctctccaaggaggacgacaggccgctcatctacatcgggtgcgtctcctacgctgacttgctgcgcgcagcgctcaacttgacccctgacgcccctcgctcccgcaggttcggctccgtccccgtctccgaccctgcaggcatgtcgctcgccatccgttccgccatccagaaggcagacgtccgggcactcatctcggttggctgggcaggcctctcatcctcatccggcgacggggacgcggctgcgctcgagaaggccgatgacgtctttctgctccaggacgtcccgcacgactggctcttcgcgcaagagcaggtgaaggcctgtgtgcatcacggcggagcaggaacaacggcgattggcttcctgaacgggctgccgtcgggtgcgtcgcgctctcttggctctattcggcctaaggaagtactgacgtcagtcgctgcctcggacagtcattgtgccatggtttggtgatcaaaaaagttggggcctcgcagcagagaatgcaggagtcggcccggcgccgtttgtcttccccagttcacctgaccgacgcccgcgcaggccaattgaggctgacccgtacacaccttctccctcctacctttcaaccctgccacaggatccctggccgcgagttgaccgccaataagcttgccgaaggcatcaaatttgcactctcgccgcgcgcgaaggccgccgcgcagaagctcggcgagcagatccgggccgaggtgcgtctccctgcctccgcccgtacctcatgtcgctgaatcatcacattgccgacgctgtaatgatcgggcgctaggacggtgtccaggccggcctagactcgtttcatcggcatttgccgcttcaagtcatgcggtgcgaggtcgacccgtcgctcgtcgccgtgtggtgttggtcctctcattctcctcttcaaaacctgtcgcgcagacccgctgacatgatgacgaacggtcgtctcgcagggtctgacgccctctgccttcgcctctctgccctcgctgccgccgtcctctctgacgctcacaagctgaagctatccgagctcgagccccaccggccgaaggagtacgacacgcgcaagcaggcgaccgaccccatcaccggcggagcgtccgagattctccggacggtcgccaactactacatgggcatcggccagctgtttatcaacccgcccaagggcgtcataaataccgcgacggccattccgaaggtgcgtcgtcctcgccaagagacggcacgctccaaactgacgcttacctttctcgcgccgccgcttcagggcgtgctgaatagtctgatctcctttccacatcccttcgtttgacagagcgctgacagccctcatctcgcatctcagtcgttcagtcgatccacgagggcttccacaacctcccaaaggcctacggaagcgacgtccgtgcgcctgcaaaggtgactggtttcaagagcggcttacaggagggcatgaaggtgcgctgcctctcctcttgccttatttgacggcccacctgaccggccgccctcatctcgcgcacgcaaagggccttgcgaccggctactacgacgggatttccgggctcgtcactgagccgctcgcaggcggcaaaaaggagggcttccttggagcgatcaagggcgcagggaggtcgtacatcaacgcgacgatgaaggtgagctttcccatcgttcgacgtgatcccgtcgatcgacttgaaaagcgcaaagcctttcttgtgctgaccttgcgctgcaacgaaagcctgccgctggcatcgtcggcctcgttgctcacccggccgacggtacgcttctctctcacgcggcttacaccctcagcgcgcatggctgactcgtaggccctccctcgaccgacgcttcaggcgcatggaagtcggtccagtctctctgggcccgcaaggacgcttcggtcgtccgcgacacccgcctctccgacggcaccggtgcgctcgcctcgtgctcgcccgcgacccgcaagcggatcatcgcacactttgccgagctcgagaaagggacaatggtacgaagggccgcgcttgagaggcgcgcacgagcagtcgtcgagggtgaggtgcggaaggccgaggaggttgcgaaggacgcggccgaggagggcggcagcgggcgagagacgccccggctgacgctggccgacgacgtcagcacagccgacgaggacgaggacgtcacacggacaccggacgacagggaagatcgacgcggccgaattcgagtgtctgtagaggaagaggacattctgcgccggctcgcggaggctgagcagaaaggctacgagcgtgcgaagcgggagaaggcccaggctagcagcgagtgagcgcaagcaggttttttgtactgtattttgactctcaagactctgtcatctggctacgagtcgttgaaagggatcaaaatacagggcagcgtcgagcggctgagtctaccaagaggtcgtacacggagagaaacgggacaatcacttgtgctcagcgacgaggttgatcatctggaaggaccgcagatggatcagctctcgtccacaatgctgccacttcagaaagtctggaccgaccttgcccgtctcgagcgcgctctttgcgttcgcaataacctgctcctccatgagcttctgcgtgtcgcgcgtctctgtacccatgtgcgggagcaggacgacgttgtccatctcaaagaaggctgggttgacgttcggctcgtccgggaagacgtcgagcccggccgagtagagtttgccagaccggagcgcctcgagtaacgccggctcatagacgacgccgccccgcgccgtgttgacgaggaccgcgccgtccttcatccagtcgaactgcttggcgccgaatgacttctcggtattcttgttgagctggcgggtgagcagcagaaggagaggtcagcttgaggaagcaggaagcggcagccttcgtcaaagacgtaccgggaggttgagcgagacgacgtcggcccggccgagcatctcctcgaggctcttgcagtactcgtactcgctgcccttctcgccctccttaattgggttccggttgtggtagaggaccttcattccccagcctgccgccatacgatgagcaatgaccgagccaatgccgcccatgccgacgatgccgagcgtcttgccctccgggtcgagcgccggcttgaggctctccttgaacttgccggctcggacgttcgtctcggcccgccagaactggcgcatggccgcgaggatcaggtagcacgccgtcgtcgccgtcgcattgtcgaccgagccgggcgtgtgcgagacggcgatgccgagctccttagcggcgaggacatcgatcgggtcgtagccggctccgtctggcaggcgagggcatagcgtgtcagctggcagggaagcggtgagaggacgcagctcaggccacgcccgaacagaggtgagcacgcactgtgcgcaatccatttgattgacttgggaagggcctcaaggaaggccttactaaactggaagggcggcgaggcgtgtgatggtcagcagtcggtcctccgccagggctcgacagtgcgggacgcacgcctccgacggtcgcgagcgattggtttgagcggtagatgccgactgcgccgtcgtattcctcgccggaagcgcacttggcgagaaattcgtccttggtcttctcagtcgtgtactgcaggagaaccgggtcgggagaggggaggtcagctcggggagcgccgcgccagggcaacgggctgcaagggagctcccgccgctggtctgccgacaacgtcatagaaggagagagggacatacgatgacctctgcgagcgagccgagtgcgtcggccatctccttctgagcccagacgatctcgcctgcgtcaagccgagcgaagggggcatcagcgacaggtcgttggagggagcgcggtcatggctggcgctgcgcgaggaaagtccacataccgacgacaaggaccttggggagcgagctggaggacatggttactgttctggatgagagcggtaaggagagagatggatgtcggcctccctccttctctggccttcgtcccttcttgtacgacaggctgcgcgacgcggttctgaccctccgccgttcctccggcccgggccgccggcagccggccccctgctttgtcagccgatctgcttcttgccctgacctcgacttgcgacgcgaatgccgacgtggaccaactcctcctgcctaaatgctgacaggccgggctaacggacgacgaacgcacgaggcttgctccgcctggtgagcctgccggctcatgcctgaacggcggcagctccacaggcaggtcggtttcctgttctcaaggccgacctagcatcgcccctgttagggcttcccctcgcatcctgctctgctcgccattgccctggtgccgagcggagctctaccacggtgcgcgtcgtccgtgctcgtcaagcttgaaacctcgggaccgagccaacccgtcgagctgcctctgcgcttgggcgaatagccttccgatgcttcctctgtctctcccgctccttgctggcgggacgggcagcacgacagggagagcacaggccccttggctgacctccacgttcaacacttagacggtcactcagcaccaggcggcaagaatgacgcttgacagctcgcgcgccgcaggttttcctgtgcgtcatccttctcttccatcagcttaaagcgctcgtttcctgatccggtagcttatatctccactttccacgacacaggacccaatggtcctcgcccgccgcatgtcgcaccgccgcgaccatctgcaggtcgaccttaccgacctgcgcgagctcgtcaactgccgccgagccgccgaagggcggtatgtccgcgatctccaggagatgcgcttcgagctggaggagcggcgggagttcggggacgacgtgaagacgggtgagcgggtgctcgccggaggcggtgtggcccgctacttgcgcgacgagatcgagaaggtgcggcgctcgcaaggcagccaggagcgtccgacccgtgcgctgaggctgactcacgcctggtcacgtctcggtacgtctgggtgtatctgctacctctcagaccgaagacacgcatgccgccatctttgcggcatatgacaagacggccgacacgctgtctacaattgccgagaacctcgcccttgctgcgagtcaggtgcgtcaacatgccgcagcccgtgccaggtacttacgactaacttcgctttctgcacgccgataggctaacgaagccgtgaaactcgctttacgcgtccctgagacgagctacaacaaatctgagtcgcctatgcccgccagcacgacctcaacggccaaagacgaccctcttccagcccgtctggacgaccccgcgctcgctcagcgcctgctcgacctccacgaacgctttgagcacaagcacgcccgtgccctcaaacatgccctgaagtcgcttgagctcgagcgagacgaggcgcgcgctgacctcgctttctggatcggccggagagacgacctcgagggttggcagcctcagctcgaggttgagccgatgatggacttggtccggcagcccagcgcgtacgtctctattcttccatgatattgaaatgggtttgattggctgaactttgttgctcgcgacagagcgacgcccgctgtgctatccaacgacatccaccggctcatcattcgagccgctatcgagccgacggcaccatcgctcccattcgccgctctcgccacatcagccttgcaggacgagctcgtggctgcggagaagctgctacagaccttaagtctcgtgcattctacttggcgggtgggtcgttccgcttctcgtccccatcatagcagacactgatgacgtcccgctctcgcaggacatcgccttgcctctcctcaagcagcacctcaatctgcattcgaaagggagcaacgccaagggtcgacttaggcagttgcggtctctgggcaactggcatatgagtctcagagtcatgcacctcaatacgctcaacgcgcaaagcctccgtattaccatctcatacgcaccgttcgatcagctgcggacaatcatcgacctcccaatcccactcatattaaacagcttcgacccggacgaggagcctttcgtcttccacggcctctcatcgcttcggtcgctctccgtggtcttcaaccacgaggtccgcttatcgtcgccgctcgacgtcgtcttccctgacctcgccgcgctctcgtcgctcagactaaacacgcatcacggcgacctgcacgagaccttcgaagccctcgctcgcatccacctcccgcatttgacggagcttcagctttcgggcatctcgtttcgcggccagatcccctcaagcgcctcaatccaaacactcgccctccttcagacgcacggcgccgatctccgatcgcttttactcgagtcgactgccacctcactcgacatggactgggacaccctcggccgcgccatgttcgggcacgtccccgagcttcgtaatctgagcacgagcattcccgaacttgggctcctcttcgaacgccaattccgggatgattgcgcagtcatctttggccactcaatgctcgacgtcgcccgcaactcgctcgtcgccggcacccgatgccgggcgttgcttgagttctgccggcgtcttgctggtgtcgaccaccacttgccttggcgtgcgtctacttcagctcttgctgatagtcgcattcgctgaccgcaccctgctcttttcatccatcagagatgcgcgcccgtctccgcactcgatcgaagatcaagtccctgacgtgctggcaggttaacttcacactcgaaccctatcgccaatcgaccgacctcgcgctcgccgcccactaccttcagcacgctcttggcattgccctcgtcgaccggcacggcgtcccgcaccaggacttttgggttgcgcagtcgcccgctgagattgaggcgctgctgcttcgggaagaagcgcagcgcgtgggtggcgcgtgaggacggggcaagggtggtatcgatacaagaagtgcgcagattcggcagagacccgaaagacaaggcagatgtgaaagctagcgacgagtggcctagagcttggcgatcagcggccactcgatcttcatgctgaggttggtgtggaccgccttgacctgcgtgtaggcctcaaggccgtatgtgccgagctcgcggccaatgcccgactgcttgaagccgccgaacggcgcctgggcgtggaggagggcgtactctgcgtgcgagaaaagcagtcggtggctctggtcagtctagcgccagcgcgatgatgagaaggcatctgaggaactgacggttgatccagaccgtgccggcctgaagggcgcccgagacgcggtgcgtttggcgggcgtcgttcgagaagacggcggcagcgagaccgtactcggtgtcgttcgctgcaggagcaggcgcggagagactgtcagcgctgctctgaagcaggaaggcagacggcgccactcacctagctggatcgcctcctcctctgtcttgaagcgcataacgcaaacgacgggaccaaagatctcctcccggacgcactgcatgctcgggtcggcgtcggtgatgatcgtcggcaggacgtagtagccgcccttggacccgtcccagccggtgccgccgcagtggatcgtcgcgccctccttcttggccgcgttgacgtagccgaggaccttgtcgcgctggccggcagagatctggtggcgagcgtaggggagtcaatctcgcccctcgcaagggatgagttgcagcatgacgcacaaggggaccgaacgaggtcgtctcgtccgaaggcaggccgacgccggtcgtcttggccttttcggttaaaatagcgacaaacttgtcgtacacagagtcctgcgaagtaaagcgggggtttgtcagcctggaacgagagcaacgcaggtgttcatcaggaggcctgacctggacaaggattcggctgcctgcgcagcagtcctggcctgcgatgagagttgaacgtcagcgctttctcgcgaagtctggcagcatgaggaacgccaagtaccagaattgaaccagatgccaagcgcggaccagagggcagcctcctcgaggtcggccgagtcaaagacgagcgacggcgactaatacgagaaggaagcgcaagtcaggaccaaatcgagatgaccggctgctgcccgagacgcacctttccaccgagctcaagcgtcaccttcttgaggttcgagttggcggccgcgagcgagatgcgccggccggtgatgacgctgccggtgaacgcgaccttgtcaatgtccatgtggctggcaaaataagggctggaggtcagcagatgagataagatagagaggtaagcgatggagaacgcacctggcgatggcattgccggtcgtcgcgccaaggccggtgaccgtgttgatgacgccggcagggatgccagcctcgaccgcaagctcgcagagcgcgagcgccgtcagggacgagagctcagaaggcttcatgacaacgcagcagccagcggcgagtgcgggcgcaaccttccaggcccacatgagcatcgggtagttctgttcgtcgcccgcagagagggagaggactcgtcagtgctcaacactcgagccaaaggaggcggctgagctggaggaacggacccaaggaatgatctggccgcagacgccgatcggctcatggagtgtgtagaccatcttttcctggccgaagcagtcgatcgtctgtccgtgaatcttgtcggccaagccggcgaagaagcggaggcaggcgaccgtgtcgccgacgtccgattcgagagcaatggtcacgcccttgccgctgtcaaacgactcgagcgcggcgagctgagcggcgtcgcgctcaatcaggtcggcgaatcggttgatgactgcagatggtccaggcgacgcgactgaggtcagcgcgttgataaggtcggacggggcgacaggacgcactcttggcccggtcggcgccggcgatcgtcttgccccaggtcgtctggaatgccttccgagccgccttgacggcgtcgtcgacgtcttgctccgacgcatgcgcaaacttgagaaccaccttgccggtcgaagggtcgaacgactcatacgtctcgccggttgacgacggccgccattcgttgttgactgcaggcggccagaaggagggtgtcagtcagccggacgaacggaggggcagctcgaaggcgctggctggagaaggtactgactgaagagtgaggtggggatagagacggcctttcctgacggtagcgtcagctgggagtgggtcgagctcgaggaggaggacatgctgcggcgggcagagggaggagagatggctgcgacggggagccggagggaaggagggtcgagacggtcagccctacagcggagcagcacgagcctcgacccgtgatctcgacggatttacagcaagcgtgcgatgggaagaagactcgcgagatgggtgtacggaggacacaagggcgagccatccctgccatgacttgcttgccgccttcttgagcgttgcgggtcaggtctctatggttttaggtcagatgagcttacccgggagagggtttacagcagggcggcggccaaacgccctcactccgcctaaccttgatctcgactcttgcggcacttatcttcaacccctatcgcgctgttcaagatggccagccagacgagagcgcataccagccggatgacgacgacggttgccgcttcatccacctccgccgctgctgccgccgcgtcctcctcccgcgtcgcgaccgcgcatgagaccggctcgtcaggcagcgagcccgccagcaacagccgccaggcctcgccgccgtcacccgcagcaccaattactcatgatgctgggagcccggctgcaggagagcgagatgatacctcgccgggcggcacgcgaccgcgtcaacgcgcctcgcgcgcctgcgatgcctgccgggtaagctcccgtcgcccgcctcgctcgcgaccagcgcgtctgcatctggcatcaatcatgcctctgctgacccgtgttcgaccccatccgctcgtgctcgtgctcgaagagaaagaggacgcgttgcgacgggcttggcccgccttgcggcccgtgcgaggagaacgggtgcgaccagactcctctcagatccgcccagctggtcggtctgctgacgggctgacgccgcctgtgtcgacgcagggtcgagtgcatctaccagaacagtggcaagaagcggtcagtctctgctcagaccacccttcgtttattgtagagctgaattttggtcgacgcgttttcctcgttgcagtggcccgcccaaaggctacaagccgacaacgagcctcaagcggaagaagaagttggagactgcccagccggcggccgctgggctttcttcaagaggacacgccaggccgtcaaccagcggcgcttcccaggtgccggccgggtccgtacgccctccaaagccagcagcaccgcccatcgactcacgctccgtctcaaggctgccatcggacgtgctctcgaccgcctacatcgagtacgcgtcgcgcattgtctcctgtgcgagcgagcctcgctgactgtatcactcttctccagatacctcctcgccctctactttgcccacacacacgttgtatggccgatcgtctacaagccgatgttccaccatccacgcacgctcccggcgctcatgtggtcgatcctcgccctcgccgcctgcatctctccaacgccctcagccttgacgccgcccgaggagatgtcggccgacgccctcttcgatcaggccgtcctcgagacgcagcgctacctcggcgattcgcggatcgagctcgtccaggcgctcgtcctcctcagcttgcggcaaacgggtaacggcatgaagtctagcgcgtggattttcagcggccaggcgtgcgcgatggcaatcgacctcggcctccacaacgccggtcgcgtcggccagagcgggcagaaggctggcggagtgcgtacgcttgccgtcccctcgaataaagttgatctccggctgaccttttcgtcgtcctcccttgatgcagagcgaagaggcccgccgagtctactggaactgctacgtgctcgacaagacgctcagcgaagaaaccggccggccctacatcctccgcggccggcgctgcacgacgcccctgccgtcggtgcttgagccagacgaatttgagccttggccgccgacgctctcgtcccactcgctcccgacgctctcgcggatcgtgccgacgcgcgcccatgcgctgaccacgttcaactcgacctgccgactcgcgctcatcgtcgagcgcatcatggacctcgacgaggagggaccctgccttgaagtatcaacgacgctcgctcggggtggcacgaacggcgagggctcggcacgaccaggaggtatgcggcaggtcgaggatcccgagatgctcagactgcgcgacgtcctgagcgagcagctcgacgagtggtggatgctcctgcccgaggagatccaggtccagggcgacgttgctgtctgcccgctgccgcactttgtcgttaacgttgcggtcagtcctagctcaacgtccacaacctttgggcatcggctgactactcgccgctctcctccttctgtagtggtaccactcggcccgcatcctcctccactcgcgcttcatcaacgccgctagccgcgagtatgaccgccactcgtcatcggccgccaaatactttggtagcccgctcgacctcctcggcggctccaccagcgctggcaacattaatggcgccagtggcagtcggcgcatgtcgtcctcgcccgacgtcgcccttgtccggtcgcacggcctcagccacgcaatctgcaccgaggccgctgacgagattgtcaagctcatcagcttgctcgaccgctggaagttgcttagctcgtcgagcagtgacatcatccatctcgtctcgcacgcgacgctgtccgtctttcctttgcaggctcgcaaagcgaccgctcgagccctgactgacgctctttctcgtcgcccaccagcttccaagtttacaactcgtctttgcccgatgtcgagctcgccaaccgggcaaagatgaacttcgtccagtgctgccagtggctcaagacgttctcgtcctcatggccggcggcgtcacatcacaagacgttcttcgagggccgtgcgttcctgtctcaacatgcagtatttgacttgtagacgctgctgacatcatctcgtcgacttcccttttagtcatctcgggcggcctcgacctctcgccgatcaacgacaccgacccgcacatcaacgccgccatccgcgccaacccgccggggccctccgacggcatcggccggcttgccaatgcgctgcctcatgtcgacccgtcgcttcacgcgcttggctttgccggccagcagccgccggtgcagacgccgatgctctcaccgacatcattcttcaagacgccgtcctacttttggaaccaagctgtacccagcgcgatgtcggccggcctcggcaccggcctgggcgggatcgacccggcagcgctccagaacaagcagcaattgtccgacgccggtggcaacggaggcggctttggtcagccgcaccatcagcagcagcagcagcagcagcagatgattggctcggcccagcaggacgcctggatgagtcctggcgactttctcgacggcctcggcccgccagccagcgcgagcggtgccttcgactcgggcacggcttcagcaggcggcggtcaggatggccatgtcgtgcgtcttttctccctactttgagacgccgattacgagctgaccgaccctctcctcctcgatactcgctcgcagaacaacttggtatatgacgccctgatggcatacatgctcgaaagctcgagctcaggccgcgtcaactagggtccgtgcgacgtggcgctccttccttcgatgatcatggcgagtttccccccggtttaactttctcactcggcgactcgtcgagcgtcttgagggcgcacttggcaagaagtcgggtgacggcgacgaggcctggtggctgttgctgacgggctcgctgcctgacgagccggcctcacgcgcggtcgcgacttggtccaacagcaggcgggaggaggacgcggcgacagcggcggcggcagcagcggcgtcagcagcggcggcggaggtgattgaagcggcaaccgtcgtcgtcgtccggctggtatgcgctctcgtctggctggccatcttgaacagcgcgataggggttgaagataagtgccgcaagagtcgagatcaaggttaggcggagtgagggcgtttggccgccgccctgctgtaaaccctctcccgggtaagctcatctgacctaaaaccatagagacctgacccgcaacgctcaagaaggcggcaagcaagtcatggcagggatggctcgcccttgtgtcctccgtacacccatctcgcgagtcttgttcgttggttctagatgccgtcctgcacggacaagacagaaactgaggcgcatccattctagagcagagcggaagagaggctcacaaggcccagggcagcgaggcccgcgacgccgccaacgacaccaccgatggcggcggtccgcgtgctagacgacatggccgacgaggtcgagtctgcggcagcggcagccgtcttgccagcagcggcgccgttcgcggctgcatccgatgcggcagcagcggacgcagcgggcttacgcgaggtcgcgccagcaggtgacgtcgtgaccggagcagccgaggccgatgcgaccttgatctcggcagcgtactgtggggccgggcaaagagtcgagcgtcagcgatagagcgacgatagagtctctacaggcggcaggacgaggccgtaccttgaccttgatgaggtcggcggcacgctcggcaatgccgtacgtcatctgcatcaggtgggcgctaatgtgaagcggcgcgaccgaggcgtcaacgacgcggaggttactggttccctgtatggtgagaaggtggcaaagtctgtcagtcgcaactcaacgacgtctccgttgacgagcggacgcagggacgcacatagacgacaaggttggtgtcaacgacgcctcccatctccttcggcatcatggctgcagagccgagcgggtgatactctgtcccgctgttgatcttgatgaacgtgttgagggcgtcggcagtgacggtcgggccgggtgtcgtctcggcggtcaagactgcgaagggggttcgtcgcagggccaaagtcagccattacctcgactcagaatggaggggatcgagacggacactcggaaagcggagcggtcgagccaatcttacggagaagttcgaagccggcgttcatgatgtcgactgcgacaagcgaagaggaagcgtcagcttcacatctatgggtcgcagaagtgccagagggcccgaccgtcgtagcccaagccaaagtagcccgggtcgatgacaggcttgtcgaacggctcgctcgagttgatcatgatggtccctcgcgagtaggggtgctggagcgcgcactggatgccagcggaggtcgggccaacgagcatgttgaggatgatctcgagctgcgagcagaccgtcaagaaaagtgtacccggtcagaatctcagccgagagcagagactttcctgagagaagacgcacctgaccgacgtccgttttgagccagccgttctggatctcgtactgtaccttgagccccgcagcgaccgtcgccggcaggttgttccactcgaccatgttgccgacgttcgtctcgagcgcggccgtcgcagccgcagcgtagctcgtgtggtcggtattgatgtcggcgagcgaggcgtagacggtcgcttcgttgatctaaggtggcgaggcgacgaagcgtcagcgcaaagcccgcttagttcgctcacgtgaggacgcacataggtccactccgagtcggcatagtcgccagccttgtagcgctcgagcgcgtcagtcgcaaacgtctggttaaacatctcgtaccaaagcggcacgcccggtgccgcctcgaacgccatcgaggccgagacgtggtcctggaggttgtagccgacgggcaggtcggagacaactagaagaggggcgacacgacagaatcagctcccatcgtcagagcgcgcgacgcaactaaatatctcaccgtcaatgccgagtccggtgagaagttgggccgggccgacgcccgagagctggagcatctgcggcgtgttgacggtcccgcccgagaggacgacctcctttgcggcgtagaccgtgaagctctcggcgcccttctcagcggcaaacctcaggccgccagcaatcgcgttccctccggccgtgctgtcccagacgaccgaggtcacctggtagcccgtcaggatgacgaggttcgcgcggggcggcagcgagtcgatgtaaccggccttggagtcggacctcgtctggttccttgggtcgagcgacgacggcgtcaagttgacggcgtgattcgagccggcgtgctggtcggcgttggaccaccccaggttgacgagcgtcggcacccagtgcgcgcaggcagagtagatgtaagcagagaagccggcctggattgggccggatgagccgtgcgccgactcatcgaccgcgatcgagaaggtcgtctgctgctcggccgtcggcgggtggaacgtctcgacctggaaaacgagaaggagcgtcagaatcgatgcaagggggagaaaattggacgaagaggaagcaccttgttcatgtactcgcgcatgacggccccatcccacgtcgtctcgcccccttcattcagcgtcgcccaagcatcaaactcgacgtcgctcggcctgacccaaaacaggccgttgatcgccccgctcccgccgaggcccttaccgcgcggccaggccttgaccgtgtcgtttgcgtcgcgctgggccgtcgtttcatacgcccagtcgtaggcggtgccggtcaggccgttcagatacgagttgcccgggatgtcgatctgcaggccgagagcgagggcaaagcgacagcaggtcagcaaagaaacactcggtgcagggagggtcagggcgcgtgaacgcacccggtcggtgaaagccgagccgtcccctccggcctcgataacagctactgtcgtattagcccactcggacagtctcgcagcgagcgcgagaccggcgacgccgcctctgccggagggggagggagaacgcgaatgcttcgtcagccgacggctcccccggtgaggctctccgctcctgcgcctcgaacagccaagttacatgaagcagcagggtcactgcaagcgcctcctcgatgccctctcgttcatcgacaccaccaaacaccttgcctcaacaagacgaccttgccgaaccgactcgagcacagcggcgcgcagcagcacccctctcttccgacaggggcagctcccctccccgcaaagtaagaagcgcttgacgcacccagcgatgacaaagtcaaacgtcttgccggcaacctcgtcgacggccgtcgtcgtcgggctccggcgcgaggcgctttcgtctgccggagaggaaggacggagagggacgttaggagacgcgtctatagttagccgggagaagagcgacgcgtcgggctcgttcgacgccgcagcggccgagcaagcgaggaagggggaaggaagagatagccagagctcgacgagcggctcgtcatccgtctgcgacgaagacgagggctggcaggcgaggcgtgggtagcgagggatgaggaaggacgaacgagctgcatggccgttcggcgagggtccgtgggcgagcgccgtcgagctcgagccagcgagcaggacgagcgccaacaggaaagtgacagtcatagctgcttgcctttgaaggtagagtggtcgagacggaggagctgagggagggtgatggtccggcgctcgagacggaggggaggcggctgaagttcgtcggtcggagggacggaaagagcagccgcgtgcgccgaaacgagtcgcgcgccccgctcgctcggccgaccggcaccgccgatcgactttggtgatcgctcgctttctattcgagcgagtctcgccgggtggagaaggtacggggtagcagagacgggtagtggatagtctcgagagaagatctagcaggaaaaagttgacgtgaaatagtgagcattggagcgggagggcaacgctctctggtcgccacggagacgacgcgtgaccgcaagcgacaaagccgacggcagatgtacctgtgctccttcactgccctccttcggcccaaaagtactgaagattcagcgttcaagctgagacagcgaacgagttgtcgtactgagaagcacctcgtcaatgtaaagacgggcgtgtgagaggacaagggattttcgctgcgcgtcgcctcgcgaccacccggctcggaagctcgacctcactcgatacgctcgctatccccctccgcggagatttgctgagcctttgaagctcgtacgtagcatatcgtgtgtgcgaggcagcgagccttcctgctgcttcggctctcggagccggcaggacgatgcatcctggcggccgtctgtcgggcgatgacgcgcgtgggctgacggcctcccttcgcatctctgggccgtcgtcctcgcctcgtcctcatccctccttctctgctcgtctgcgcccaaaacaaggacgatcaaagccggtcgttccttttcgcgcgtcgtccgcccgctcgcccggccgtctcggctccgactcgtctcgaaggccgtcgttgtggctcccttcgcccgccgccgccgcaccaccgccggccccgctccctcggttggagcgagctccctttctcggcccaagaagccccaagaccaccccctttctgtcgcaagacgatgggaggcaccaacaagtgttcgtctgcttgctactgacctggcgacgacaatcgctcgcccgaccgaccagcgcgctgacgtgcccgctctctcgcccctctctccccaaccgtctcctccgccgatctcccgccgtcggcactccctccggccaaccccgacgtcccatccatcttccctacacaggccccgtctgctcggcaaccttcacccgcagtcagcatgtcgcccgacacatgcgctcccgtttgtctcctcccctttgccttcgctcacctgggcccttgctgctgctgccccaggcaggcaaccgcgaccaacagctcgctaactgaccacaccttcctccttctcctcaaccgacagataccggcgaccggccgtacccttgcccgtggtgtcccgagaagtttgcccggtcgtgcgtctgccctctcacgacttgcccgctgagtccttgcgactcgtccgagacctcagcttccgtggggacgtgacctgacgcttcctcacctcctcttacaaccaccgtcttcagcgacctcctcgcccggcacaagaagaagtttcacccggatggacccaactcggcacccccaccgccaaagtactcgcgccagcccaagccggcagtcgccgccgctgctgccgctgccggaggagcaggcgccgtcgcgggccccagcaccggcaagggtaaagcccgggcagactcgacggccgagggcgttgcccagctctcgctctcagacaactacccccatccagccgacggcagcagcagcagcagtgcgctcgccaatggtctccggcgcgggtcgtacgccggcctgacgagcgccgggccgtttggatcgtacacttttggctctctcccggccttcccggacggctcggttccgggcgggccaccgggcgagccgctcgtcgtcggcgcgactggcgcaccgcacccgtcgcttctgccggcggccactcaaccggggtacgccgccgcgcctcctcgtgcggtcgactactcggccgcctacggccagcctcagcagcagcatgtgccccagccaagttaccaggcttacgaccggcgcttctcgctccctggcgcactcggatatacgccctgcgctcaatcgcagcagccacagcagcagtaccacccccagcaccagcaacagcagccggcctatcgtgcccggcaggcctatgtcgccaatcctcagcagcagcaacagcagatttacgctcaacctcttccgccgggcgccagcggcagctcgctctacgccctcggcccgaccggcgccgtctcgtcccggggctcgtctgcgtcctcgtccgagtacggcgctggcccggccgaccatggccgccagcagcagcaacagcaacagcagcagcggcttggtcctcctccggtgtccgtcacgccctacgcctcggcctcctcgtcgactggcggccacccgtcggccttcgcgcccccgcaggccatcacgacctcggtcaacgcaagcggcagcggtttgatcgactcacccgtcggcgtctcgcccgccgagagcgggtcgacgtttgcctcgtcggctcggtcgggctcgcagcagacgtcgcctttgccgcccccacagcaacagcaggggtggtatcagtccggaggcgggccgtcgtacgcgccgccgcagccgcagcaacgccagcagtaccagcaacagcagccgtactacacctcgcccctggccggcaccctcgacggcctcagcgggcagatgctcccaccgcagcagccccaacagcagtacacgctcgacccggcatcctacgtaccgcacctcctgatcggcgccgacgactccgcagtcgacggcgcgagcccggccggcggccagagcagcggcgtgggcgggacggcggcgggcctgccagccggtggtgagagcgggtcggacggggggccaaacagcccgcttgcactcgccggatggagcgggatcgactggacgacgccagtctttgtgcgtcctctcgctggttgaccttctttcttccattgcgagcgctaccttacctgacgcgcttccttcctgactgcccgcagaactcggactcgccggtgccctcgccaggcctcttcggcgcaggccgggccgtcaagccctcgctcaacccgctccaggctccgacgtcagcaagtggcgtcagcgcccacctcggcctcatgacggacccgcaccagccgcagtccggcgcgcactacccggcctaccttcaacaacagcagcagcagcagccacaaaagattccctcgctcgaggacgtcaaggacatctggcgctactttctctcaccggctttgccgacgccggctgcgcagccgtttggcgggctcgccccgccgctcgacgacggcacgctcgcggtcgacggcggtcaagtacttgacggcggagcgaacggtcaggctatcccgtccggctcgcagcagccgcagcaacagcagccgttcgcaacggacgaggcccaagcgcggagcttcgaagacgccatccgctcacggcccacgatgcaactccagccgccgacggggccgatgaggcctgcgcggtcgacgacgggcagctcgcctgcgtcaggcgggtacgacggccagcagcagcagcagctccagcagcagcagcagcagcagcagcagcagcagcaagcgtacatctgcgctcctcccgctggccatcacccgcatccgcagcaccccagtcatccccagcagcaccagcaggctgggccgtactactcgacctggccgccgccgacgctcgccccggccgacgcccgcgggctcctctcgtcgacgctcgccgctggcgtgtccgtcggcggcctcgcacccggcggcggcggtggcggcgtcaagcgcgagttctcgtcggtcgacctcggcacacctcgttcagccggcggcggcgggggcggaggctacgcttcgtacttctcgcccccgacgggaggaggcggcggcggcgtcggcggccggccaaagatgccccggctccggagcgggagcgtcggccgcgtgcccgagggccaggtctgggagggcttcctcgaaggctaccgcggggcctcgctcggctttggagggggcgagggcgttttcccaagcgcctgagccgtcagcctttcccttccatcctcgcctcctccactcggacactgttcagcgccagcctttcggatccagcatcccttttgtaccactttgctattcgcatgttcttgctcagggtctcgtgtccacgcgagcgccggaagagaaggcagccacacgttcccctcactgacgacagtcgagcgccaagcccagatcgcatacagggtcgcaacggaggcgtcatcgctatctacaagggagaggccaaaagagaaaggggtctagttgcgcggctcccatcccgggttgtcgctgtggacgtggccgacgccgccccggacgagccagtcgaccttgaacgaaaggtcaatcgaggtcgcgttggcgtcgtcgtacgaccagacggcgagcgcgatcgtgttctcgcccgagacgaggattcctgggtggacagggaagagcagctgcgcgcgaggggaaaaggggggtcagccatcgtcgtagcggtagccggaagaggcgacgtacctgcggcccgaccgaagctgccatccggcccatctgccagccgttgacgtaaaggaagacacggtggtggccgccgagcttgccaaagtcaaacgacatgccgacgtcgtggccttcggggatggcgaggtcgagcgtcgagcggaagaagcggacgccaggaccgtcgagcgcgggtgcggccatcgagctgttccacgccgagtcatcaaaaccgggcaggtgccatcccatccgctcgccgtgcaggcctccttcattcagcgagccgcggacgcggtcggggaagtcgacctcgccgccgtggttgccctgcaccctccactgggtgaaggtgagcgggggtgttgacgtcgagccgagcaggcggacctcagagatgccgcggaggttcttcgacttctgctcaagaaagattaaagaacggtgtcgtcagaacccgaccaagcagcagtcgaggaagaaaaagggcgacagaccttgtcgagctcggtgtctgagggcaggttgtagaagcgcaagtcagccggcggcttgtcagtcttcagtgagctgtcaagacgcaccctgatcgaggcccatgtggtcctgaatgacgaggacgacgttctccgagccgttggtcgagagagcgccggccgggaaatcgacctggagcgtcttgaaggccgtgtcggtgaggccgtggatcgactcgttgaagccaaggaaaacgccgttgaggtaggcggagaaggcgaaaccggtgccgccggtgacattgaggtagaggccggtcgtatcgccggtggcgttgaatttgccgcgccagaggatgctgcgagcaggttggtcgaagcgagagtcagcgtcgtcctctcgtagagtcgcacatgccgcggtacgcacgttcccgtaacgaagccatagtcggtcgccacgagcgcgaccgagccgttgagcggaagcgtcgtcgcattggtcgaggtgtgatccgcgacgacccaggcggcgtcgtcgtagtcaggcgaagcttcgggcagcgagtcggcccaagcccagtcggagaaggtcggggccgtcgcgttcgatacgtccgggccgggtagcgtcacactgcgaacgagcgaacgggttgtcagtaacggacgaagggagaagccactcgcgccagaacgcacagcatgccaaactcggtgacgttgaatgagacgtcggcgccattccaggtcacactgctgatcgaggagggcgcaaagatggtcgccatcgtctccttgtcggtgtcaccaaagagggcgagctggccgccgtcctcgaccgagccgttgcggacgaggtgcgggccgatgaccactgcggacgagttggtgccgatctcggcgtaggccgaccactcgctgtcgtcggtggcgagcgtcggctgccaaaccttgtaggccgaggcgtggtcgaggatgagcacggtcgtcgagccgacctgcatcgaggcataggtcgaggcggacgggatctggaaggtgaggacgaggtcaccgttctgaagggaaggaggaagtcagttgaggcgtccagacgatcgtaaatgtttgatcggaaaagggacggacgacatcccaagtagtcgcattcgtcgagccttgctcgccgccttggacctgggcgctgccgagcccggcaaagacaacctcaaacgtctcgttgcggccaggggtaccgtagaggatgaggatgtcgtgctcgtcgtcgagcgcagcagagagcaggacctcggccgtcgagtagcggagggtcgtgctgccgaacgtcaggtcagcgacgatgatgcgcgagtcgcggccgccgatgaccagctggctctgcaaagaggtcaggcgcgggcgagagctgtcagctcaggccgatcgcggctcatggacatgaggggacttacgccgtactgcggaacgttcaaatcgccggtctcgggcgtccagatgtcgagcgtcgacgagcgcgtaaactcggccgtgatgttggtcgcccattttgcctggcggacgatgtagaaggccgcgagcgtgtcggggttacggagctcggtcgtccagaggccgccgtcctcgggggtgtagaacgtgccgttctgggtcggccggccgatgtagggctgccgcttgaacgagtactctgaaaactcgccaaactggccgaccacctcggtctatagagagcggggtcgagcggtgtcagcggcagtgtcaccgtctttgaggcgagcagccgacccttacgcacctgccggatgtcaggcgcgttgcgcaggaagaggccgagcagcttgtgctcatggtacttctctggcagctggcgcgactcctggacgtaggttccgtagtcgtagctgcaaagaggaggtaggccggtcagtggctgaggttggctggggaagaaggagcttttttatatcaacatacgaggtgtagacgacaggcgctgcgatgccgccccagttggtgcctgcgagaaagaggatcagcatcggaagttcgcatgcctccgagccgcatggcacgcaccgccgtacctgaaggtcaaggcgaggaagagtcagtgtcgtttcgcagcggggcagctggggggaaagggggaagtaccacatgtacttggaaattatcgtcacacgcgcctcgagcagatagcggtactgaactcggtcaaaagcagggccggtcatctcgcggcactggtcgtagccgccgtcgccgccccagctgtcagaggagaagaacagtgcactccaggcgcgtcagccaacgacgacctggatcgaggcaacgaaagggcgtacgggtcgaacgagccgccctggatttccgctggagtttagcacgaccttatcagctttcggctggcgagcgcaggcgaaaacaataaggaactttccgaaatggtaaggagcgtcacgattcacgcggtccgacctacatgtgaggggaggatcgagtcagctgctgcgatctccgagggaaaaggagagtctcggacgcaccagccaacaaaggcgtcgacgagggccgggaagctcgagttgcccttcgcgcagctgaagccggcctgcattgggaaagatagatgcggtcagaggtgaggcgcgatcagagcagaagccggctgtgcagactcaccgggtaggcgtcgaccgcggcgatgtcgacggcgccctggccaaaggaccaatgaccgcgacctctgcaggaacggacctgcctcgtcaacttgagtcgatgagcagaacggcagaagacgcacctcgggttattatgggtcagcgggacggtgatgccgttgcgtcgagccgattccttgagctcctccatgtgaggcgagtagttgacgccggtgtcgaactgaggcagcacgcatcgtcagcagcagatcagggagcgttacaatggcagagcaagagaggctcacctcgttttctaattggaacgtaacaactggcccgccctgcgaaatctggttttgagcgacgagctgcgtgatttcgtcccagtaaagctgccaagcgtcgaaatagtcggtcgcgttcgtccgcatgtcgcccttccgacggatgacccagccgggaatgccgccacccgtcgtctcggcgttcgcaaacggaccaggccgggcgaggatccaaatgccgactgcagcgaccgcacacgggttcagcgagatggccttcgtgcgcgattcaatccgcagcgacgcgaggcaatggacatcggaatggactgaccctctttggctatgtcgaagaaggcctggaggttgcggatgccggtcaagtcgatcacgccctcgctcgggttgctgaagcgacaagggcaagtgaacaggatcagccacggcactagacggacgcaacgatgtgcagctaagcgtacgtcatgtgccaagggacgtagatgctggcgagcgggcagagcacaggtgacatcagctgggcggcgaaagcgaaaggtgatcaggtaaggggggtggcgcacgagattgcgttgttgcccgcggccttggccttctgaaggaggtcgcgccagaggtcgacaactggaagacgccagtaatgaaactcgcctgaccagatatacaagcgttggcccttgacgtagctgacgggagcgagtgtgggatcggtcgaccggctcaggtcagtctgcggcgctcggagggaaggaggaagccgatcagcgccgcccagccggcagactcacagcgagtaccggtcccaggcgacgtcgtcgatcaggccagtcgtgtgcggcttcgagtactggttgacgtaggtgacgtttgggttgacgcccgggacgtcggtcgtcagccgcttgcggggcgtgtagaggtgccggttcgagaggacgccgttggcggtggctggcgagctggcctgggccgtcgacgccgctgcgagcaggagcgtcaggaggccgggcaggagggcgagcatcttgaagagcaggagagaggaggttcccaacgagggaggatagagtgagcgatcaggtcagctagcgagagctcgggctcgtccctttgaggggaggaggagctcgggctcaaggcctaacgctggcccgctctcgcgaggctgggcgtcatcgagtgggtttggctggctggccggctcggctcgtcgaccccatgctggtcctgctgctgctgagccgggagatgaaagacggtggccggcaggcccggtcgatggagctagcgaacgatggagggcagagtcggacgaggccgggcgggcgcgcccaatcctctcggctcgtcttccccccggctcacgaaacgaagaactccggtcaaggcgagaggaaacgaacgccgctgccgcctctgtctctctttaagtctgctggtcctctctttttagtcatgtttaaccgaagcgagagcgcactgatctacatgcggtcaagcggcgtgagcgtgagcagccggagcgccgtaccgaggacgtcgcgggccgagatgaagaggtacagccgggccttggccagctcgggctcgacgtcccggacacggactagcagtgcggcacaaacaacgaggtgatggaccgagcgggcgaagggaaggaggcggggcgggagatgtcagcgtgactcgctggcagggggtggcgagcaggaggcaggagggaacgtacggccgtcccaggcgcccgagatggcgtgcgcgagccggaacgcaaacgtaacaatcgtactcggctcgctcaggctataagcggtccggacgacgtctgggtagagggcgagcaggtagatgatgtcgtgtgcgcggtcctcgacgagcaggtcggtctggacgagcgacgtgtcctcgggtaggacgacgttgggattcttgcgctccatcgaggcgagccggacgtgcgcgtactggaggtagacaccggtgtcgccctcgaacgacgtcatctttttcatgttgaacgtgtagtcgaggtgcctgccgaacgaaggtcatcagcaacagaaacagagaggagaggcggcccaggcgagactgaccgcttggcgctcatgtcctggatcttgactgcgctcatgccaaggacatcggcgcagtgctccgggttctcaatctgggcaaacttctcctcattgcgcgtcatctgctccatcatggtcgacgaggcctcctcgaggatctcgttgaggaacttgacggtgcccttgcgggtcgacatgccgagaactggggcgcgagcacgaggggtcagacgagggggagacgaaacacacacacacacacacgctcgaacgaacccatgccaaagttgatgtgctggagctggtccttgccctgggcccacgggtagcccataagttccaggaccttgaagaactgggcgaggtgcaggttctgctgcgaggcgacgacatagatcatcttgtcaaacttgtacttttcgtagcgctcggccgccgcgccaatgtcgcgggtgatgtagatggtcgtgccgtctgcggttggcaaaggagtcagctcggctcaaagcgacacacgcgagccgctcgggacacgcacccttcttgcggacgacggtgctctcgagcttgtacttggtcaggtcggcaatgagcgcgccctcctggtccttgacgacgcccatctcctggagctggtcgatcgccttggtcatgctggccgtctcaacctggctctcgcccgagtactcgtcgaaatgaatgttgagccggccgtacgtctccttgtacttctcgatcgaaaagtcgcggaagcgcttccagaggccgagcgcagcctcatcgccgtcctccattgccttgaagaaggcccgggcggcgtcctcggtctcggtcgagccggcgagcttttcggccgccgcgtcggcgttgacctggacatagacgtcaaacaggtgcttgatcgcgtccttctcgagctcctcctcgctgccgtgacgctggaagccgagcgcgagcaggccaaactgcttgccccagtcgccgaggctacagggcgagggcggacggccgtcaattcatgcacaacggcagaacggcgcgggaacgtactagttcatgcggatgacctcccaaccgcagtactggtagaggttgccgaggaaggcgccgatgatcgtcgaccggaggtgaccagcatggaacggctttgcaatgttcggcgacgagaactcgacgatcgccttcttgcccttgccgagctcgggccacgagccgtaggcatgcgggttgaaggttggctcggacggctgttggacggggaaggaccgaatctgagcgaggacgagcgaggcgagcgtcttgcggctggcaggggagagggagagggtcagccgagtggccgctcgctggtacggcccagccaccaccctaggcggacgcacttgaggttgaactggagggttccgcccttggtgacaatgcacgtcgcgacgtagccgttgggcgtgaactggcgataggcgagacgcaggcggtcagcccagagccgaccagccgcaagaccaagcagagcgtctcccagcaggtgacgcggcactcacagcctcggcgaccttctgcgcccactcgtcgggcttcccgccgagtcggaagcgggcgacggcaatctggaagtcggcgcccttcttggctgcagcggagggcaaagggagggcgtcagctcccagcggcgcccagcggcgcccagcggcagaggagcatagcagggtgggaacgcactgggcgtgtcgacaccgacaaagacctcggcgaccgtcttgccaatgacgggcgcgacctgggcagcgatggcgatcctgaatcacgagcaggagcgcgcaggcgagaccgggccgaggttagctttgcatgagctgctcgagcgcaaacgctaagcgaaggagacggcggccgggacggaccggaatgagtccatgaccatcttgtcaggtgccgtgccgggcacgtcgggcaggctcggcaggtcgagcttggcctgctgggcggcagtcgtggccatgctgggcaaggagcggctgaaggagcggcgggcgaccggcggagggaagagggcgaagggcggagcggcgaggcgggcgagctgctgcggcttgaagacgaggctgctagcggccaggcaagaggaggctcgacgggcaaacgtcgtggcggaggtggtgctggggttgaaggtcgaggtagctgccggtcgagctcgacggacctgactcttgccctcgtcggcctcacgcggccgggaatagatgattttaaaagcgtttcgaccggctcggcggcttgccccttttgagagcgggcgagcgggctgagaggcagctgacaaggaccagagcaggcgggcgcttgttctcccgcaaccacgacctcctcccgcttcttccattgacccatccagacctcgctcctccaaagctcagacacaaggtgcgtccctcatgctggccttcctcgtcctctcagcaggcctctgcccgacggcacctcgctcccgccgtcgcctggcccccctttcacctcctctcgtccttgctatcgccctctcgttcctccatcgtttctccatcgtcctgacccagcccgctcctttctctccctcttcccctctacagatgcccgaccagcacggctcctacaacgtcaccagcgcgggcaccaacagccaggtccgtcggcggcgtcatcattcgcgggaggagctctgtcgcagcgggcgcccggacccctcccgccatctcacctctgtcttgacctctgacgatagcgcgcgcctccgcctctcctgcccggggcaataactacaacaaccgctcgtacgagtcgggcggccaaggctacaactactggtcggtccccgcgtcctccatttcgcccgcccgcgcgccgctcctcgttgacaccctcctcctcttcccgcccccctctcgcccctcagcaacaaaatcgcgtcctactactactcgaaccgcaacggctcgacctaccacgagactggctcgggccaggcgacctatacgaccggctctggccagacgtttaccgccgacaagtcgggcggcgcaagcgggggcgcgagctggaagcgggcctgagcgcgatgatcgtctcgcacaggccgtgcaatgagaccttcgccggctcaagctcggcctcgcatgtcgctcttctcgccttgtctctccttccgcttcatgccctccttttctcttccgccgttgacgatgacgagttcctctctgtccgcctcgtcgacctcggcccgagcccgaagaaagtgccaagagaggtcgctcttcgatgctccccttagtgcatcatcactattctgtctctcagcgtttcagaccgaggccatggtaaaaagattgtgaagagaacgggattcgaacccgcgcccgaagactagcgagtcaaagtaatttcaaccttaagctagcgccttagaccactcggccatctctccttcgatggatgtccacatgtttggaataatcatatacttttagatctatcctgcctgaagaacccttgctatcagcagtggtttcctcggcagtcgagtcacgctcgctcgagaaattgtacatccatcagccgctcctctgccccggcagacctggcacctgccccaactctcgccgacacccgcctgggagcaagaagccaaagcgctcgcggccggcctcaatgagacggcgcgggaggccgacggctgaaagcgagcggtcgagtgagtagagggcgataaagtctttccactacgacaatgtatgcaagagggaagccgaagcgggtcagtcagagagcggcgggagacggaggcagacgagcagggaggacgcacgcggtaagcctcgcgccacatgccaaagatgtcttcgccgctgcagacaacgcgctggatccgctcagggtcgagcagctgccgcgcggccgagcccagccggtccgcatgagagtagcctgtcgacggatcaaagaaaggccgtcagtcgtcgggcatcacatgagaggcgagagagactctgtcggcggcgacccacccgtcatctttgcctggaactcgacgagcgtccggaaacagaacgagcagtgccagccgctgtcgacgaggaggcgttcggtcgtctgcgagtgaacgtaggccgatcggccgggcgcgaagacttgcgcttgaagccgccacgaatcgtagtcctgaggccgagatgggccggggcgggcaggcgggcagacagtcggtcagcgtcgctcagaccgcacgggacggtcccaaatcgcaccgtcggccactcgaacgagtaaagataattgcgcagctggagatggagtttcccccaactgccgaggtcctcgccgtcactcggtcgagggccctcccatcgacagctcttgagcagctcaaccgtctcgcccctcggaatctcgtcgacgtcgcccatcaggacgacgacgtcgccctccttcttgccgcgggcgtgcatctcgcgctcgagcacctgcgaaacggtcgctctttgctcgcgctcgaggacgaacggatcctcagcaggatgggcgagtggccgtccaggatgatggacgacgaggagcttgtctgcgaacggcgcgaggttcggcgggaggttgaccgagggcgccgagggcgttgagccggggaggaggagcgcgcggggaaggccggtgaacgagtgggtcgaaagcacgacgacgaagagggccgtgtgcggcgcgagctcggcaagccggatctcgagcaggtctagctcggtcgactgccggcgagcatcagatcaaggtcagccacccgacatctagcaagacgactagcgcaggagaagggctgcccggaggagctgcgaagggagacgcacgaggagcaccgcgtcccagatctcgacctcctcgcccgttgcgcgcttcggccagccgtgcagctcgcagagctcggccgagcccccgagcccttcggcatagtagtgcacgagccgctcgctcgggccgagcggcgtgtcccaaagcggtcgggtcgtgtaggtgaagaacgttttaatctggtagctgcccgaacgagggccagggttggtcgggttgaggcgcgagggggtcggtgacaggcagaggtcagctcagcttcggccggctttgcagccagcgcccagactgaaggagcatgcgacgcacaccgacggcagctttgcgagcaggatgaagaaggcgaggactgcatgcgacgagaggcaaggcggttagcgaccttgacggtttagagctgagctggcgcccgtctccggagccgaaggcccagcaggctgggcccgggagcagagcgagacggacggcctacgagtccgagcacgagctggcggtagcgtctcgaggcgaacaggttggtgaggacagtcatcgcggcatcgggcgggtcgaggcaatgtgcaagggcgggggttgctgctgagggtcgggcgaacgggcggtcggcgtgtttgcccttgcactgcggagaggaggatgcgagatgtcccgcgcagtagccctttcgcccgcactacaaagggaagattcgcgccttccctcccggctatgaccccccgtggcgatcgtccagtacgtccgacccgagcatgccgctctctcgcccgtctgataccctctccttcttcaccccctccagcacccgagcaggccaaaggccgcgcctgcccgccgaccgactcgacccctccttcgtcagcccagacaaggaggcggtccgacctctcgtgggctccggcttccctccgagcagaaaagaggccacgcaccccagctcggcgctctctccaccttggcaccggaagttgcactggcactggcctctggctagtgcatggttcgagcggcggctgcagcgggctcgaaagagcctccgtccctcagcaagctttcgcgtcgtgtcctgctcgttgcgcagcgacgaggccagagcgggacggcgacgacgcaccagacactcgtccaccgcgagaggacaacacaaaattacgttggtattcagaaccgagtggaacacgttcttctacttcgagagacgcctttgcaggcctactccctcgatcaagttccgcctgcgacaacgcccgactcgccaacgcccgccaagaagctcggtcaagtcctcgcaagttcggtcaacctcaagatgaacgtcaagattcagaagtaccagtaaccgtccgcccactctgtgggtcctcctctgcttgcgctcggacgctctacccctgttgtttctcgctgaccgccttcccttcccctggtcagttctctccctctctccacccaggacgaaggccgtcgaagatccgcgacgctcgtcgcttggccgccccacgcccggcagatagttgcgaggagatggctctgttgctcgcaggtgtttccaagcgtcgtgtggtgcgtgctgacctctcttggccggctgtctgaccgcctccgggaacggagcgcagcgtcgacgtccggctcttgagacccttgcgcggcgccggctttctttgaaggggtcggtacctcaactcggagggtcggggcaacgcgacgaaactccggtgtccccttcctcttggcctgctcggtttgatcgcctgccggctttgaggctcggctctttgtgctcgttgagcgcagagcggccggcctcgccgggttgtctgcaatgcaaccttcgaccctagcgagtttgggctcgggtctgtcgcatcttgacgagaaagtaacgactgcgatacaatggcaagctctcgagacttccttcaaggaatgaaagctgcacgaaacggtcgctcgacaggtcgcagagcgacgacgggcggcccctttcttttggcgcaggccctgttgcgccgtcgctcgtccacgtcctttcttcctttgttgacccacccccctcccagccttttcgagacccgagcagcaattgactagcagtttcgctcgcccaataccggtagcccgacggctgccggtaagaacgtgtcctccgccggcaaaggaccatcgatcgtcccttcggtcgagcagctcgaccccgccgccgccacctcgtccgccgccgctgtcaacatgaccgcccttccggagcgcctcgtcccgccgcccgaaatccgagaccagatcgtcggctacctgatcaacgggccccgctcgctcaggcaggacgttggtagtgaatggctttggctctcgggccgacaggatgcgtctgagctggctcgcctgcactctctcgcctgcgtttgatttcttgctgaccaccctcgtgccgctcttcccggatattgtcgcgtaggtggaaggtcgccatcgtgaaggacattctcgacggtctcgagcttttccgttgacgaccacgcctgacaccagcacgggctggccgaggaggcagagtgggaggacattgtctcgcttgaccctcttctgccggcctctccatttcgaaggacgacggtcatgagagaggcgggaacaggcgtatgtgcggtaagcaacaggagtcaaacatctatgggaggcggcgaaggcgggttcaagtggagcgaagagagaaagggcgtgacggagcggagaatgtacaagggggctgatggcccaagagaaaagcgagtcgttgcggtcgtgtatgtgtcgggagcgaagtggcggtcgggagaaggaaggacggaaagggtagaagtggccgcagccaggtctgtgcgggcgagcaagcaggtcggttggctgtgagggcgtcgtcgatcgagtgggagaggtttaggaggcccttcaggccgcctcgacccaagcttggacctcccactcgcccggcgccgtcgtctcggccgcctcgccgagatcaacgcgccagaagcgccgcgagcggccgtccttgtccttagcgagctcctcgacccggcccgccttgtatgcgagcgtcgtcggcgtcgggtccggaatgccctcgcccgccgtcgaatggagcggccggccaaaaagctgaagccgggtcgggaaggaggcagaggccgggaccgagatgatggcctgcgctgggagctcgctgaagtggaggcgcgtgaaataccgggtgactgcggccggctcggcggcgactggggcggaggtcggcaccttcgagccgttggtcgccttggccgaggcgagaagcggcgtacgctcagtctgtcgtcggggcaggcgcgactagtcagatttgggcattgtgaggccgagaaagagggaaagcgactgaccggctccggcttcttgctcgtcttccgattaacgtccgaagtggccgagaccgagaagttgaggccaaagacgccgaggacgctgctccagaccttccaaacgagcgcaaagagccgaccgaagagcgtctgaggctcaccggctgacgaggccttggctgcgtcggcgtgcccctgcgtcttgccgcctgcactggaaggctcggtcggcgccaccatcgtatcatcggcttcgtcgtcctggctgccgtcgtccgactcggcctccgatccgtgcacggtcgaagcctgatcggccgaggtgtcgcccgaggctgagcgatcgtgcgtagagctcgcgctggggacagtgacgcagccagtctcggcatttttggcgacggcggtaaaagcagctttgagagggccgaacagaatgtcggtcggctgcagtcgtgagttagggtcagcgggcagtcgtgcaagaggtgaccggaggataaggaacgcaccttgccgacggcatcgacgacctcacggagatgaacgacgtcgagcgactcaaggacgacgtcctgctgctttggaagatcgagcaggaggcccttgcccggctcgaggatgacaacgtcgtcagtgcgagccgagtagacggccatcgggcctgacagtccggccggcgcgccgatggcggtcgggaaggccgagccaacaggagtggaagagtagatgacgagtcgggacgggtggtagagggctgtgagagccggaccagaggtccagagcggggtgaggaccttgtccgagccgatcgcggtgccctgcgcggcgacgagaagcgtcatcttggccgtcgcagctttcaagacgagctccttctgggcaacatggccgtcgtcgatagacgagggctcggcgttcgagtcgtcttcacagctgaccccaccggcggtcgcggcgatgatgtgcggcgtgcccgggtcgacgagcgaagacgtcacctgaaacgtcggagtgttggcatcgaccgtgtggaggacaacgacgggcaggaggataccgtgaggagcgggaagtgtctgagcgacaggcaggccactgcgagcaacgggacgaaggagaccgtcagtaccgggtcagggtcggtcggcgacaggaggcacgcactcttcccagctgatgccgaagccggcccactctgcgccgggaccaaccgagacgccgagacggccctcgcctccggaccactcgcgcgaggccttgctcgccgcgctggaggccccgttgacgaatgccttggacgcgagagccttccaacgtccgccgctgctcgtcgtcggtgccgacgcgccgctgccgaccaagatctcgagcttgccgttggagccgccgtcgccaagccactcgatgccgccgtcggggtgccggagccggtaggtgtactcaaagtgacggctctcgctgagctcgccgagcgggatgcggagggttgcttgccgggtcggagctggggcgaggagcggcgggctctcgccttccgagagcgagagcagcggccagtcgaccgcctcgtccggcggaggcgcgatggcagttggtctgtcgacaaaggtgacgtcgcgccagctcgtgccatcccacgaagccgggtcgtccgacggcaggttcgtccacagctcgcactcggctcccgaggcagtcggcctcgaggctacgaagctgaggacgagaacgtcgtccgccccgggcccgtcgctgccggctgctggcgggatcgcgtacgcatggaccgctccgagagcgggcttgaagacggccgtcatgcttctttgaggatgctgagatgggaagatggggtagatgagagtcgaggcggtcagacgtccttcccatctcgcgcgcctcctctcccctattcgctgcgccctgccagacgctagctccctccagactaccacctccttcgcgtacccccatctcgtaggcgactgacgagcatgtgggcgttgcttccgggttgcgctcttgcccgccccagcaactccgggcgtctgggttgcagccggtccctgctgagcgcatccgagacgagagggcgcgtcagaggcacggcggcgagaaacggcccgtttggactccatcaccgaccgggccttctccgttcagcagtcgagggacagcctcgaggtccgttgctctggccgacagacacgaggttggagccggaatctttgtctctgccgctgaaagctgaccgccgggcgccggccaagacgccgtcgagtcgcaggggctcggtcgagcaggcaggcattccgcgccgcacggcgccgaagcggccagactcgcattcgacttgtctcgctcggagcatttccccctcgtctaaccaaatcgtgccttcttcattctgcttcctcgcggcgttcacggggggccagtcctgtgagaccgggtcgtcgcccctttggagcctggcagggagacttgacgcttctggacgaactcccctctaccaatctgacgcctttctcccgagacccggccccgctgcttctgtttatcgtgcgtttatctccgcccccttcgatttgggaacaggcctgccggccccctctcggcatgacaagccgaatgagcgggctcgccttccacctctgccatgccttggcgcgactgctcctgcgacaagtggtacctctgcctgtattgcgcgcgcacccactggctgattgcagcaatgcttgggaaaggctgcttggctggaggggcaggcggcccagcttgactgactcgaccgagctcagtgaggcttgtgtgcttgcgggagggctcgatgtttgttcttctgcttgcgtctgcttgtgccagctggcttaccacaatagcgccctgatcaggcatagagcaaagagctcagcctgccgaagctgctcgcacccggccacctgacctcttgcctgctcggatccacgacggcaggccgctcgtagcgcccttaggagcctatcgagcttgccgcggaatcagccagttagacgagcgggctggaccctctgccggccagccccacggcaggcccgtcgcctgcgtcgtcgcctgcgtcgtcgcctgccagccaatcatccatgggggagagagccggtcgcgggagcaagctgatctcgacggctcggccgggctccggtctgcttggtgggccgcggaaagcctcttcgacatctccccggggacgcctcccctccagcggtcagcggtgggtcggcttgcccgagggcatgcaagaccggtcgcagggagccgctccttcgcttggccacaggcgctccagagccgaagggcgggctcgccgaaggagggggttcagggaaatggcccgcgtggcgttcttgcattgtctcaccccgttcctccctcgttctcgcctcgtttaaaacagcttccgtcgccagccaaaacgcctcctcgagcgaccaagcgagggcacgaagggcccttcaaaagaactgcatggaccagagcccctccgaccggtctccttctttttcctccccaaccccacgaggagagcgctacgaagagcgtcttttgcccggcagattagacccagattttttgtctctttagggtggaacagaggcgggcttttcgattgcggaaaggtctagcgggggtggtgggagtcataagtgggcggatgaggggtggtacaagggcgtctgtgcggcccgcgatcggggcaatgagggtcgagcgttcgaaactgcgcgctctgcagcgggacgcgaatagcagaaggagaacgagcgagaaggggggaccgacagggacgcgcaaaagcgagacggatcggatcggagcggggcgggtcatccccttaccagaacgagtcttcgccgcctttgcccttgttgctggccgagacgacagcctggctctggtagaactcggcgatctgcaagaccgtttcgacaggaggcagtatttctgggtatcagctctgagacgcgaaacgcgtgaaaggggacggaaggggcaggggcgcacctgatcgctcgtcgtcgcctgatcggcgtctttgtcgtcgcggacccggatgaagcgcgggaagcggagcgagatgcctcgctcgtcgacctggcgagaggggcagtggcaggacgtcagtcagtccagcggtcgggggcccaaatgaaagcaagagtcgagggcgcaacgcacgatgccgtggccggccgtgtagatcggggacaagctcaggtcggccgtcaggacctcccagacgacctttggctggaaccagacatcgggctttgcgcctccgacctggatgtcgcgccgggcctttgcgacctcgagcggcctaagcagctggtaattgctctcgagcacctcgtccgagaagccagtgccaatcttgcagaccgtctggtactcttccgtctcggggtcaaagcaggcgaggaggtaggcgccatagacgttggtccgcttgcccttgccgctgtaggccccgacaacgacgaggtcgagcgagtcgccgacgccggcgaggtaatccttcttgagctgtagatgagcaggtagcaaagcaagctcagggtcagccatcgcgcacacctccggagtcggccgagattcaaagcgactgaccttaagccagttcatgctccgccggctcggctcgtacgtcgagtcgaccgtgtcgagcatcttgaccatcaggccctcgcagctgtccttgacactctcgtcgaggaactcctggatcgcgtcggtcgagtcgccgtccgacgactttgcaaagccaaattcgccctcgaccggcgtaaagttgtcgtagaggatcttccgccgctcgtgcagctccttttgcaggagcgactgcgagggcgtgccgcggaacagggacgcgtcagcacttggaccggccgtcaccaagcctatcatcggcagacgcaccacgccgttgaggtagaggatgtcgaacgcgaagatgtgaaccttgatcgtgatgtcttcaaccttgacgtccttgcgcttgcgtttggtaatctcctggaacggcagaagcttcttttcggccatgtcccacgcgacggcctcgcagtcgagcacaaacgagttggcgccctccgtgatcgcctggcggtcggcaggaggaatttacgagggatcagcaggcgtccgatcgagcgcaggaggtaagaacgacgcacccgcggcagctgctcgaccaggtctggatacttgccgctcatattctccgagttgcgcgagtagacggtgatggtgccgtcctcctcgcggtggatctggaggcgaagtgagtttaaaaaaagtcagccgggggctcagcaacctcaacacgggttgaacaagggacaacggacctgagcacgctcgccgtcgtacttgtactcgcacgtgaagcgcttgccctcgaagcggtcgaggacctcggtgatggccttggtcggcttggcgagcatcggcttgagcggaacgcccggcgtcagcttgcacttgtcgcgcaggccctcggtgccaaactcaagcagggccggaataatgaggttgaaattgggaagctcgctaggcagggcgcggagtaagtctggtcagcagaggcggtttcagaaaagtttcaggtggcaagcaggatgcacctgtagacggccttgacgatctcgacgccctcatccagcttttccttgagctgctcgggcgagagcttagctccctctgcggaagagtgagcaccaaggtcagcctttaggcgaccagctgcgacttgaggcgggccttactgttgcggacaatgacgctcgcgtgagcgaggccgatgacgaccgtcttctcggccaggccgagacgcatcttgcccgacagggaacgaacgataaacttggcctcctcgccttccgacgcggccaggagcttgttgatgatggcgacctttttgctctgggcggcgctgccgctgatcttggcgatctcggtcagcttggcaaagacgccgggaaccgtcagaggctttggcttatacatcgtcttctgcttcgaccgagaaacctgccgaggaaacaaagcggcgcatcaggctcggccgtcagctggcaatctgcgggccgcagagatcgaacctaccagcgcaacctggccgaggtcgccttccttctgtagatcgagcttgatctgcgcaagcgagcggccataagcctcgccgatagccttcatcaggatggaatcgccgatgccgagctccatgccttcataatccgggcagagctggaggcggacgaacgccgtcagctcgcacgcaaggacacggtccggagctttacgacaaccgagcgcacccgattgatgcagaggtagatgacggtgaggagactctgagcgccagtcgcgccctggcccgacagcaccggcgccttctttcccttctcgaggatcttttccgcctcgccctttgcctgggcaggcgctgcgcgggcgacgacgaggacgagaaactcggtcaggtactcggtcatgagcaacctcttggtcgtcgactcgatcttctggaagcagtgcgcgagcgcggcgtaaggcacgctgggcgacgccgagcaggagggagggccaaagcaacaagcgtcagagatcgcttgcaacaagacgtcgacgagatgcagcacggtacgtacgcgtctccagcctcccagacggggtactccttagccgtagcggaccccctttcctggaggagggccatattagcgctggcggaaattcaaggagaccgcagctgggtcaatcatcaaagggagacgagtctagcaggccaatcgcgcgcaactcacgcagaggcgacggccgcctgcatgacacaatagaggaatgagagagagagagtcaggtctagacactttcaggagaaggcagatctacggtgagcggcgcaccttgccctttgccttcgccttcgctttgaccggcagggcctcctcggccgagtcctcgtcgctcatttcgacctcgctctcgccaccgcttgtgtcctcgagctccttgaggatcgcattccgcttagcaggcgaggccgacttcttgcggggcagcgcccgagcctttcccttccggtcggccccgtccccctccgactcgccagaagacgacagagccgcgacggccgaccgcttgcgtttgctcgccgccttgatcggagcctcgtcctccccatctgacgagactgatgccgcagaggtctctcctgctgtgaacgccttgccagttgacgtcgatggtttgggagccgagctggccagggcggagacaggaggcgacgccgcacggaccttcttggccggcgacgagcgtgtctctggcttctcatcgtctgcgagggtcaagcgagcacgacgcatcagcaagcagggcaatggttacggacagtccggcagcgagagctgacctggagcggtagtcgtcttggaggacgatgcgacaggggcgtcatcaacagccatcgcgtcggcattcggctcagctgctgcagcaacgagagctgagtattagcatccactgagcgagacagcgagccaatgtacagcgaagggcgcacccttcgtcgctgccgtcttgccccagaggccgtcgagcgtcggctgctcctttttcggcggcggcacgccgctgatgtgcttgaagagcgtcgtctgcttcggatcgacggccatcttggacttcttggcgggcggcatcgctgcgaggagtggccgtcggcaaaaggatctgaggagggctcggaatagagtacagggtagaggtgaaagtcgggggggggggctcatcgacgtcggtgagggcagcacgtcggaaggtcggagggccgggcgcgaaggcgcgtgcgcgacgcgtcggcgggcgggcggcgcgaaatgagcagccaccacgtacgcacgtctcgctcgccactcaagtcgtgcgcttatgctcatgaaggaggctttcagcagctgatgcacaggacaagccgttctctgctgacaaatacattggccgggcgacgagacggtactctgaccgcgagtgacgcctgcgctctcaacccgcgcaagccggaccgacggccgccatggtcaggtcgtcaaaggtcgtgaaatcgtcgtctctgctgttgtcgtctgcctcctcggcagcaaagcggagccttcctctagcgtgcaaagagccgacgcttcttgccggtgccgatcccacggcctgcgatgccggccgtcgacgccgtcatccgccgggcagcctcacgcaggtggatgggcgcgagcgggcccgagtcgcctcgctcctgctggaccttccgagctgtacgaggcggaaaggtcggaaggcaggtctcagcttttggatgaaccgttgcagacacccggccacacgagccactcaccgattgacatgacctgcccgacgtagaccttcgcgacaccgccgatgatctgcgccatgtcgtcagtgatcgtgttgctcgtcgtcgtcgtgatgtgctgaaattcaaggagagatgcacgtcgggagcgggttagcagctgcacggccccacagcaaggcgaagcttcctggcacgcaccctcttgaccgactggcgattgaatgaggcgaccttccaggcatcaaagcgctcgcgctggccggccgacatgtgctcggtcaagagactgtcagggtacgagagaagggggggcgaggtcaagcggcgtcagcgcacagacgccatggagacggatgaacgccagcaggccgctctcttgctcgagcaaatgcgacgcacatctggtcttccttgacccgctggatccgtcgccgaacctcaccctgctgctcgccctcgccaccttcgccatcaccgccgtcaagccgtgcgagctcatcctcgtcgtcgacgacctcgtcctcgtcgtcatcatcgtccctcgtgccgcttggaccgggcgtgggtgctggcgtcccgggaccgaccgtgcctcgacgagaggggccagcggcgggtgtcagggctcgagcagatcggctgccagcggcgaggtcgaccgaggtgacgctgtccctccgagcgcggttcctcgccttgcctcctccgccgccatcgctcggaccaaagccggcgctctcggcaaactcgtcaaagctgatcggaccggccgagggcgtcgaagggccggcagtggattgctggctgtcacgcttgcgcttcttgtagggccctcgcgagcccttgcccttgagcggccggccggtggtcgagttgatggagacggccggcgagggcgcgtcgtagcctcccgccggcgagggcgcaggcgagcctccgtacgggtcgggcgagccgtacgacatttcaggctggcagacgagaggtagaggagtagcgtgctctgctcggaggtcctctcgagcgacaaaagatggatggccgtccaagtgtcagcttgaggcgaaggagaggacgcgaaggcggcgttctgccagccccgaacgtccatcagcctcgactcaacttcacgtctcgactcgccaggcctctcgaaaaaagtttagacaggagcgcctagtggcccagctggccgtcggcacgcgccatgtctgccgtcagagtctgcgcatgtggtgtgtatccggctgctcgcgtcgcttccttgacccctccgacatgctcctgtcgaagctgacctatgctcctgttatgacaaaggctgcgaccgtctgttcggcatgtcgagcttggcagcgggccgtctgctcgcaaaggtgcgtcggctactttctgcgcttagtgagatgccttgactgacctgtcttgccacttgccagccttcgagctctggccgccggcccggcacacgacggatggcccagctggcccactcaccgagccgtacaacgtccccgaattcgtcagcctcgactagctcctccgggtcggctgtactagcttcgacatcaagtgcgtcgagctctaagccactcggtcgagaggtaaagccgccccctcttggcagtgggttcaggtcgcagccccagccgcgtgtcgagcaagctccaggccaggcttcgaccttcaagccagctctgtcgagctgcaagacggctttccagggccgtctttcaagcacaggctttaagtcagcgaccgattcgtcgaagggcaagggagcatcaggcagtgcaggccgccggtcaacgcttccgcccgactccgcactcgcagacgccggcgagaccgagcttcctactcgagcgacgcaggtcgaggcaacggcaagccagatctcggtctacatttcgcaagccgggctcgaggtcaagcggcaccagcgcgacatcgacaagtatcagctcgagatcgctcgctcgctgaaggctgcgcatcggaaaggccagcagccgtccgagggcgagcggcaggcgccccacgagacccacctccgctacctcaagtggtggagggatgcggccgtacagaaggaggagggcctccgaatagcgctccagcgcatgcaagaagcctgcgccaacggcgtgccggtcgacgcaaccctgtctggtgtactctcagtcgccgtcaagcaggcggcccttctcgcggcccggtcgccggctgcacagaatagcggaccgcgcgtcatccgggagcttaagggcagcatcatcgatcctctcgagctgcgggagctgcgcgagcggtcggacgacgagcgacgaaggtccgacatcctcctgccggccaggatcatccgcaggctccaagatgtcgtcccacatgaaaagcgccaggtcggcctcatgaaccgcatccagcagatcttcgtctccgattgggccctatctttcgcgcccgagaagagggcggccgtgcggcgctttgtcagagcggtccagggctggtcgtcccccgacattattcagcgcaaccccctcgaggacccgacggccgcctgcaacccgctcgatctcgacatcctcgtcagccagatcctctcgccggtcttggactcgcgcgacgtcctcgaggcactgtcggccttgctccaggtcatcgtcgaggtcgtgccggccgacgtcgcacagcaagcgcccctcctacggcacaacgtcatcgcgacgctgctcctcagctcgtccacgcccgaactggctgttccttggctgctcgacgtgccggagccgcctgctgccgagcgtgcgggctacatcgacacctaccgtctcttggcagcgacgacaacgctcgactggccgtcgttccgacgcgtgaccgaggccctcctcgcaaatcaggctctctgcgacgtcaactcgctcgctcgtgtcgtctttctccagggtctcgtcctccgctacgacgccgtgcccaactttgtcgaggcgttcgactggggcttctcggcctttgtcaaggctggactcgctaccagcgacccaaagctcgccctgagagtgtcggccggctatgccgacaacattggcgcgcacgagctcaagctccggctcgagtcgaagcttgagatcgttgaggcaaacgacttcaagcggcgacgggcggggtcgaccttagacggggtcggtccacagcgagtcgacggaccggccgctaccgtcaataaccctccgcttccgctcgtgtccgactcgcaggtcgtcaagaagtacagcgtcgcgctcgaccccatccttctcgagcaggtcgttagctcgaccgacgaaacggccgccttgctgtcaagggtcgtgccacctcgggtcatagcacaggacgtctggctctcgtcgttcggcgccactttccagtccctcaacgatgtgtggcgtcgcttaaggcctcagcggacgccgccgccaaagccagccctggcacagcctggcgagagcaagtcaacgtcggcgccggccagtctcccgctgccctctcccccgctggtggtttcgtcaccccgttacgtcaaatctcgcgcagcttggacgatggcagcaacggtcaagcacaggaccagctcttccccttccccggttccggcaggcaccaaacccttgaccccaccccagccgccgccacaaatggatcccaagctatcgcctccacatctagagcgcaagcggccagtcatccagcccgttgtcaagcggccgagcccatcggctctcaaggcgcttgcatccgggtcgaagacggggcggcgctgaagcggctcgcgcctcgaagaaggcatcgcgttaatgcatgctcgcttgccgactgcagtcttgtcgtctgagtcttgcgcaaaaacaagtgccttccggattgaattgagagaggcatcgaagagacagacgggcagagtgctaggaacgagggtggagcgcgagagctcagccttcatagtcctcctcgctcgcttcctcttcgtcctctccgccgtcgtcatctccacccttgccggtccagtcgtaggcgtgccggtcgtcctcgctgtcctcctcatcctcgtcttcaccctcctcaagctcgtcctcgtcctcgtcctcgtcctcgtcctcgtcgtctccggcggctgtcggctgcgccaccttttccgcctttgagacacttggagcggcgccgaaatctgtgaagccggtaaaggtcggcgcggccaacttgttgctatcaaaaggcgggtggacggctacttatcagctgatgcaggtgaagaggtcgcgcgagcaaggctggaggatgacgtacgcggcaggtgtggacgacggcgcggcagcaaacgagaagcctgacccggctgacggctgggcgaacgtgctcttaggcaggggcggcggcggaccgaacgagaaggacgacgaggtcgccggcgtcttgaccgcctgcttgggcgcgacgaactttggagcgctcgtgtgcgagctaggcttctcgcgccgacgagatccacctcccgagtcgtgactatcgccgggcgagttcagctcaaaagcgcttgcgtcaagcgtgctgaacgtcgtgggcggaggcggtgatccgaacgacgaaaagttgagcggcggctgggcgagtctggacgtcggcaccttctggcttgcccctgacggcggcgggccgccaaaatgagacggtaggccgccaaacttggagggcggcgtcgccagcgagcccatcgtgagcggcgactgtgccggagcagccgttctttctaccggcacaaacttccggggcgtcgccagcagggagcccgagtccgacagtgtgtccgcagctgagccgaccgccgtaggcgcaagcggatcgctgagggcgagcaccgggcggggtacgcggcgcgggaggaccgtggtgacgatgggcgtctgccgggcgtcctgaatgatcgaccgagcctgggacaggttgcgctcctcgttgagcgcccgcgcggccagggcggccacctgttcctgaacgaccggccgggcgagagcggctcgaagtggtgacctcgtcggaggcgcgggtgcgtcggtcaccgcagagctgaactgctgaattgctggcgcctgcagacgccttcgcggcagggacgacgagagctgagccatgtcgaagcgaagcgagaggtcgtcaatctcgtacatgcgctgattgagggccatggtgatgtgccggatcgagcgcgaaatggtgtcgagcgtcggagccctgacagtccagagagattgtcgcacacccgaggtcagcgactggacagcgaaaggaaaggtgagccgctcgggaacgccgacgactgacttgagcggctgtgagccacgcttggccgagagcacgagcttgtggagaacctgcatctgctcctcgagctgctcgatgcgctcgctgacctgcttctgctgagcccgcagccgctgctgcgtctcagccgcttctggtccgagctggcgcgagcgcatgagctgcaagcgttggacgggtgctccaattagcatgaaggcagcgctgacgtgtgtcggcgagcgcacgcacctcgatgaccttggggtcgtgcctggcgccaatgaagcgggcagcctcttcggccttcgtgtccgctgcgaagagagcgcgagtcaggctgaagattagcgctctgcactcctgaccgaagaaaggctcgcgggctgaccctgcagcatcaggctctggacttcgaggatccgcttgcgaagctgaaggccctcgtccttggccttggctgcgctcgtctctttagccttgatctgcctcgagagcgcggcgagatcgccgagcgagactgaggtggccgcgtcgaggtcgcccttgacggcatgcggtgtgcccgcgtccttcaggaacaggctgtggttggttgcggtctctttgagctgatggcgggcgagagatacgagcggcaggcatacacgaatcagccgcgcaactcgggaaaatggtcggtgatcaggtcgacgagacgcacgtcttcgatctcctcgttcgtcgccaggtatgcgcggagaaattggccggacagacccccaatatctaccgtctccgccgccttgcgcgtgggtttggaggaaggtggatcgctgggcgtcgacccgaaggccttgagcggaccaccaccgccgctggcgccgggtggcggggctgggctgctcgtgatcggcagcgccgaaggctttgcaggcgtcgagccgggaggtgtcgaagcgaacgacggcggcttgccgaggccgagagccgaaggcttcacaaccggagtggatgagaaaggaccggccgcagcagcttccggcttgacgggcggcgaaccaaggccaaatagcgaaggcttcgtcgagcctcccgctttctccgtctctccaagcgagacagtcttggccgaagactgcggtccaaactgagacgacgtcggcggcgcaccgaaaggcgatgaggccggcgcgccaaaaggtgacttgccagccggagaggcaaagagcgaaggggcggcagcaacgccaaaaggcgaggctaccggcttcgagtcgccagtcttaggtccaaagagagacgaaggggcggccgggaacgcgaaggccggcttgaactcgctcggcgtcgcggtcatgggagccggctcggaggctggcgcttccgcctttttggccgtagaggcgccggcaatcggcgctaaagccgagggcacggactcgccaaagagcggggtcttgatgggcgcagggtttccggagagaggggcttcgaacggcgaggacgtgggcggcggtttgactggcgtcgttgacggctcgccgatgggcgacttcccctggcctgcaccgaaaccagcaccaaagccggcgaacgccttggttggcgccgactcttcagcggctgggctggccagcggggacgacactttgggggcgctgccgaacgccgaaccggtcgatccgaacgccgaggtcgcagtcggcttgagagcaggcgccgatgccgtcaccgcgcctttgacgggcgccgtgtcctcgcgcgacgcaggtggctgctgtccaaagccgccaaacccactgaaagccggggcggcagtcttggcctcgccgccaaaaatgctcgtgcctccatcgctcgccgcgggactcttggctgccgagccaaagccgccaaagcctccttggccaccactggccgagaaaccggcaaagacaccgccggccggcgttgcggtcggtgagatcttcgggcccgaaatgctcggcttgccgaagattgaggctgcgccaaaggctgaggaagctgccggcgatccagtgagcgaagcgacgcctccgaaggttgaggtggccgcttgagcaggggcggtgccgaaggcgcttggtccggacgacttggccgacccaaaggcggcaggctggccaaaggccgaagacgtcgggctgggagctgctgacgcagctggagttgtgtctcttttgccaccgaagagacttgcagtcggcgcggttgtcgccagctctgtgggaacactggcgtccgccggcttcgcagggctgctcggtggtgtgcttgccgagctagcgtccttcggcggccacgcgtccgccttggtctcggtcgtcgcggcagcgtcagacgagtcagcctccggcgtctgctgctcgtccaaggtagagccaagcacattgccgaaaccagagaagccgtccttctttgccgctatcggcgactcggacgttgagagatgagtcggggtgaccgtcgtgttagcgggcttattggctggaggcggcgtcgaaggctctttgacgtccgcctcgggctcgacgggtgcctcctccaatctcttggtcaccgccggcgagggctcggcttcgggcacctgttgagcgatggttactgccccagtgtcttcgatgctcgtcaaggatggctgagcggcctcgggcgtcggatcagccgacgtcgtcgagccgaaaccaagcgagccgagatcgatgtccgctgcaggctgtgatgacagcgcaggcggcttggcaggggccaaattggaaggagagccgggaggagaaggcgaaggcgaagccgagcgcgagggatttgactcctcatcgcttgacccgctgggcgagcgagggggcgagttgccgcgagacgacggcgagtcggagcctgatcgcgggctgcctggcggcgtcgacacggaagaaagctcgacgaccttggcctccgtcggcgaaggatgccccatcgggacgaacggggcagaatcaggcggcgtcgacgacttggcagccgcgccaaaggcagaggtggcaccaaaggccgatgcaggcacgccaaaggccgaggtcgtgggtgcggctgacgggccagccgtcgccttcggactcgagcttccgtagggcgcagaggatccgaaggccgaggacgccgagccgaaggctggagtcgatccgaacgccgacgacggcgagctgccgaaggccgacatcgaggagccaaacgcgctcgacgccccagctccaaaggccgatggcgagccgccgaacgctgacgctgtgggcggcttcgacggggtcgtcgtcggcgagctcgagccaaagacgccgccggcgttgtttttctttgcctgcgggccaaagccagcaaagccagcaaagccacctttggacgggcctgccgagaagttaccaaagccgccagcggcaggcgcagcaatcggagcaatcttggtccccgagatggaggaggcgccgaaggcaggcgtcgcagccgcgccaaaggcagaggtggcgccgaaggctgacgaccctgaggctggcggcgtcgatgcagctggcggagctccaaaagcagacggggctggcttcgcttgcgtaccaaaggccgagggggcaccgaacgcggacgtcgacgagccaaaggccgaagagctcgcccctggggacgctgcggcagactggccgaatgccgacggtgcgccaaaggcccctccggccggcttcgatgctccggggccgaacgcaggcatgccaccaccaaaagcagggggcgcggccgccgatccaaaggcagaagccccggccttcggagcgcttgcaccgaaggccgacgatgcgccgaatgtcggactggagccgaaggccgacgacgcgcccggagtcgaggaagcgccgaacggcgaggtcgagggtgcagctgtctgcgagccgctcggtggagagacctttccgaatgccgacggcgcaccaaaggcagaggacgagccgacggccgaaggggcgccgaagccaaaggccgtaggcggttgggcggagaacggcgctgtcgacggactagcggctggtggcgccgctgccgaagctcccaccctgaccatgccctcgtacgcaccagcgtcggtgttccagatctcccacgcggcgacgactccctcgcttgtcagggcgagcagctttggcgcaggcgggaggtcgggcaactcttcgccgccttcgagtccgcgcttgagcggctgcgtgcttcgcaggtcgaggaccatgccgagaagcgagacgtcgtcgccgccggccgtcaaaggaagcgacggcgccgacgcttcctcgagcgtgagaagggcaaagggcgggccggccgagaaggcgccaacgaccgggctggaggcggtcccgagaaagccgaggtgcttcttgccaccccaggcgccgagccaggcggcgtgccgagcttcggcgcgctcgcgcaggccgtacgccggcaatgggtcggcaaagcgcgtgaatgtgtactcgacgctgccgctggtcgtcttgacccggccgatgaggaaggtctcgacctcatgcgagggctcatcggcgccaggctcggtcggtgtgttgtatgacgcgaggaagaggtcgttctcgagccaagataggtggcagacctcgtacgggccctcggctgcgatcgatgctggtacggggatcggactcgacacgggcgctcccgtcggcgagacaaacgcgatctcgcccgaggccgagccgaccgcaatctgcttgcccttcgccgaccaagaagccgccgtgaaggcgccggggaggctgaagacctcgcctcgcgatgcgacgtcgatgaccgcaagggagttcgccgagagcagaagcacactcgacgggagcgccgaagggttgggcaagagcagcgtgagcggcgacgggagggctgggaatacgtgggaaggctgggcaggggacgccgctggtccgaggagcgagtcgaccgagaagagtcgaatggtcgctgaggtcgacgaggtaacgagcgtcgctccgttgctcgtgaacctcagccactgcaaaggttgaatcgaccgggaaggtcgtcagccgacagcgatgctaaggagacgacagcggcagcagcaggaggcagtacgcacgaccagcggctccccaacctcaaccatcttgtcggcctcgagctgcacctcgacgcccttcctcgccgccgttagctgctgctccagccgctcgagctggtagacaccgagctctgatagagcggaatcatgtcagtccgaaggcctcagtctgatttgaggcagctggcggggtttagaacgcaccggtcgagccgccggcagcgacaaacacgccgcgctcgttgaggacgtcgagcagctggcagtgcgccggcagaccagcgaggtcaaccggcgggaacaggcgagcagcgacgtctagcgtcggcttcttcagcgtgagccactgaacgagaggggaggcggccatcagtcgctgagctctcggcaggaccaggacgaagggagtgcgggacggacgggcgcgtcgacctcgagtccttcgacctcggtcgcagcggcgccaccggcagcggcagcgggcgcggatgctccgaacatcggcaggattggagatgactgcgtaggagacttgcaggcagtcgagaaggggagaggtgcagaaggaggggtagcggcagaaggaggcagcaggctgagggtcgaaagcctcgccgcgcggccggcggaggcggttcgcctcgccgcaagtactggtcccttttcgcccggtccacgtcccggtccacatcgctcttgcattgtttccgaagacaagacatcgcgataggattgttggatcgctctacatgtaggcgccctccggatagatcgggtggcggttgacggcgtcctcaaggtcatactcgacggcgccctcgccccaagcatcccagtcctcgccctcgcccccgaccggcggttggtcgtcctcgaactcgagccggatgcgctcgacccagcgtcctgcggccgagccatcgagccgagcagcccagatggccttctcgacctcctggcgcatctcgcgatcgtaccacggctcctctgcgcgcgcgccccagcggacgtggaggatggcctcgggcgcaagattgacagctagcaaatgagcgtcacgcgtccgaatcgctggatagggccggacgatgacgtgtttgatgggcgagtgccggaggtacgtcaagggcaggaacccaatgtggtggctggcgagctcgaggaccttggttccgtggagcgtcaccgaggacagcgcggcgagcgtgatctcggtcgacgactcgggcgctatcgtcagaagccgaggggaaaagtcgccgagaaacttggcgacccgacgcgagagcggctttggccgttgtgagaggtaggacgagccctgggcgagggagaggtggatcgtgtgcagacgaggaaagtagggcatgccggcgccgcaggacgccctcgccgtcgtgacggctgagagagagaagggcacctttctgaaggagagaggtagggaaagacgtcggtcagtacgtcggcgaggattatgctcggtcagacgagggacggacttcagaggtgcgaacgagagcttcagaacgcggagctcgttgtagtcggccaggcgctgctcgtggatcgccggccgccaagctgtctcgacgtgcggaccgaggacaaagtacgagtcgtaggcctcctggctcttgagctcgacccgctcgtagaggcgtctgcggccgatcgcatgccagaggccgcagacgagcaggagctgggcgccggcgtgcgagcctggctcgatggcctcgagcaggatcggctccagcacctcgtaaggcagctgggtgatcgacatgggcttggttggcgtccgaggagcggctcggcaggtgaaagggtcggcaggggtcccgatgacgctggtcagagagcaggtggaggagggcgcgcaggtgggcaaggcggctggatgagacgggtcgcaggctaggggggcgacatggcggcgagccggcaaggcggtcgccgtcttcagggctccatggtcgtctcgcagatggactgcctggttgcttgagaggggtgctggaggggcaaagagctggtcgacgtcagcaggttggaccgaagcagcagcagcaagtctcctccagccaggagggaggcctgcctcacctcaacccctgaccatctcacccttcccagccaatgtcggccatcacgatccgcctgcgctccaaggagggcacattccgcatctcggtcacgccagagacggcgggcgaggacctcgctcagctcgtacgtccctcgaaccccgggcatcctcgccacgccgcctcttccacgtcgcgcggaggtcgagcctcttgctgacactggctccttcccctttgctcttctcgcctggacctccgtctcctgttcagatcgtcgatgcgctcgagaccgcggaccctgacattgacacgatcacgctctcgaacgcgccgggaagctcgggtcagcgcttcgcgctcgacgcgctctacggccggacgatcgccgagctcggcttcaagtgaatgcctcaggagacggcctcttgttccttgtcttgcaagctgccagagaggcacttgcagaccttggttgccttgctgacgtccgactccctcgctcgaccatctttgcgcaggaatggcgagctcctcttcattgaattccaggcgagccaaggggggagctctgagcccccaaccccgacggtcgaggcaccacttgccgttgctgccccggtgcccgagaccaagccactggccgacctgtccaaggtcgaggaggacgacggtgcgttccgggcagggatcgacgctacgggccagagtcgcaggtgctgacgttgttcctttgccgcttgctgcgcccctagtcgacaagtactggcggtcgcagacaggcctcatcccccgcgggcgtgattcgcgcttctgcaagcacggcgacaaggggatgtgcgagtattgcacgccgctagaggtacgtcgcttgcgcggtgaagggcgtatcgcacgcaggccgcaatgctgacgatggcggctcctgtctctgccggccgacaaccgcagccctacgacgcggcgtaccatgcggagcagaagatcaagcacctctccttccacagccatctgcggaagctgacgggctcgcagtcggcctcggcctcggcgacgtcggccggctcgctcccgccgctgacgccgctcaactatcgggtcctgacgccttgtccgtcgggcgcccacggcgactggccggccggcatctgctcaaagtgccagccgagcgccatcacgctccagagccagccgttccgactcgtcgatcacgtcgagttcgcgacgcccggcctgatcgaccgctttctcgagggctggcgcaagagcggcacgcagcggatcggctggctcgtcggccggtacgaccggtacgagagcgtgccgatgggcgtcaaggcagtcgtcgaggcgattgtcgagcccgagcaggagggcgaggtcgacggtcttgggaccgacctgccttggaaggatgaggagcgcgtcagcgagctcgccagctgggtccgcaaaggcctccaggtcgtcggtgtcgtctacaccgatctcacgccgtaagtcccggctggaaaggatcttggactatctcttgcgttcaatgccgactctgccgttgcggatccactccctgcaggtcgccggacgacatcacaaaagtcctctacaagcggcacccccagtcgtttaccgtttcctcgctcgagcttctcctttcagcgaccctgcaggcactccactggctgccgacgcgctcgtcaccgacgggaacatttggctcgcgctttgtctcatgcgtcttgacgggcaccgaggacggcggtgtcgatgtcctggcgtaccaggcgagcgagcaagcggtcgccatgcggcaggccgacatggttgaggcctcagtcgagcccggcacggtccgcgtcaagaaagagggccaggcgcgctacgtccccgatgtcttctacacgtgcgtcctccctcttgttctgcagtcgcgggtttcacagctgacctgctaacggtcgtcctcatgacgttctcagcttcaagaacgagtacaagctccaggtcaagcagacagccaagccctgcttcccggtcgagtatctgctcgtcacgctcacgcacggctttccggtcgcgccgtcgcccctgttcccttcgtcggccttcccaatctcgaacaggtcggccggcatctcggaccagccgagcatgagcaaggttgtcagctcactcctgccgatccttaaggcggccgcaccaggtggcagtagccggctcgaggacgtcaagccaaaggacgtcgtcgagccgctcggccgctgggcaggcgactggcacctgctcgagtacctcgcgagggagggcggcttcgaggaggacgagatgaagctgctcgcgcgggtggcgatgcagcatctcgagccagaggacgcgttgtcggccctcaagcggctctggaccgagcccggctggcagacgttgctcggcatcgctcaggccggcgccgatggtacgtgttcgaccgtctttgtcggtagaagcttcgctgacccgacctgatcctggcctcgcagcccaaagccaccaggcgtcctacaacccggctgactaccagtcgatggacacagacgacttccccgacatcccgccggaccacgacgacccgttcgcgaccggcggcggaggcggtggcggtggcggcgtaggagggtcgaccgtctgcccgcactgcacgtttgagaacgagcactctggtggcgactgcgacatctgcggcctgcccctgcagggctaggcccgctctgtccatgcgatagcacccgcagtggggtacaatctcatgcaaacctgccttcctcgcgagctctgagcagcgactcgaagagtgacaggctgcaagcgtgcacgagtgccgagttgctgcgcggcgcgcgctttcgacctcctcgcccctttgccctccgaccgatctgccgctctaccgcatcatcacctcgcctgccccaatcgccacgcgaagccgctcgtcccgactatcgcaccacgatttgagcatctcgttcccaccgttgctctagcgtcccttcaactacccggacccacctcgccttcccccgatgtcctcctcggctccgctcgtccacctgcgcaactgccgactctcgacgcccgagggggtcgctgagcctggctcgctttggatcgatcctgctcgaggagccgtcattggcattcaagacatcttcatgtcgatgagccggggcgtcgttgagctcgacctggaaggggacgtcatcgctccagggtgagctctcgccttcctgccctcatctcgccgcatggtcgatcatcgctgacgcctaagcttgacagcgctcaggttcatcgaagtccaaatcaatggcgcctacggtgttgatcttggcgtcttgccggacgaggagagcttttcaacggcggaggctcaggaggacgagtacctgcggcggctcgagacggtcgcctcccggatcgtcgagaccggtgtgacctccttcgtcccgaccgtcatggtgagctaccggtctcgaaaggttcctggaggttcaggtcgttgacctgctgcctcctgatcgtagacccagccagccgccatctatcctcgcctgctgcctctcctccgaccccggacgttcgcgtcgggcgcatctgtgctgggttaccacgccgaggggccgttcctatcgccctggaagaccggctgccaccctccggccgacctgcgaggctgctcggacggcgacgtcgaagctatgtacgggctagaggcgctcgcgcaagaaggcgtcaagctctacacggtcgcaccagaggtcgatggtgtctggggcgtcatccctgccctgcgagcgcacggcgccattgtcagcattggccacagcaaagcgtctgatgttcaaggtgagtctcgatggctccctcgcttgacgcagcgcgccggtcctgacgagcctgctgctgctgcgcccagccatggccgccgtgctgggcggcgcgagcatggtcacacacttgttcaacgccatgcagtcgctcgaccaccgggacacgtgagtctgaggaacgggttcctctctgtcgtttgagggaatctctgacgcatatattgtttctgcccttggccagagggatcgtcggcctcctgagcgcccccgacgccttgcctttaccgctcgccgacaggcttaggcgtcttcgagggccgtcggaggatgacccagagctggctgaggccatcctccaggctctcctcgacgttgcgcagacctgttcccccatcccgccgccggccgctgcagaggataaagcaccggcggctccagctgttgccgaaggctgggagcggttcgaacgacccttctacggtctcatcgccgacggcattcacgttcatccaaccgccatccggttggcctatcgatctcaccccgagggctgcatcctgacgacagactctttacacataatggacccgcacgccaaagacgggcggtatcctttccgaccagggactgatctcgtccgcaagggcaagcgggttacacttggcgactcaaaaaccctcgtcggctcggccgtcgaccttcagacgtgcgtcctcaacctcgctgcctttgctggcgtgcccctgcacgaggcgctcgcttgcgtgacgacccatccggcgcgcttgctcggcggcgaagttgagcggcgcaagggccggctcgagcggggcttcgatgccgacctcgtcgtcctcgacaagcaggggcgcgtgcgggcgacctgggtcgcgggcgtcgaggtctggcgccggccagagtagagagcgtcattcagatcgtcatggccttcctcacgcatcgtccatcggaagccggaagccgttctgctgacggaccgtgtcaaagatcgacatgccgaggcgcgacgtctcgagcgacatgcgcgcactttccgtcttgccgtcgcgaacgcatcgagcgacttcatccgccatcctgtgggaaagccacagtcagtggcccgtttcgtcgacgtcggcagggagtcgcacccaccagtgcatgccgcggccctcgatgtcggccttgacagtcttagtctccatcggaggcgaggtgccgtcgccgccggcaaggtcagttccgccgtggcggagagagatggtgtacgacgtcgggcggaaggctgggtgggggatgctgatctcacctgcaggaagacgacagtcggggggggtcagcgcatcgaaagactggagtgggagagattgccgcgccgcacccttcgacccttgaatcgtgactgcgatcgggctcgtctcggtcgcgatgctggtcgagcagatggtctgagcgccttcctcatcccagttcatgacccaagtcgcatgcttgtcaacctggctcgggatctgcttgaggtcggtaaactggatgctcgaggtgatgcggctcgggggttgggcgtcgggcccggcgcagatgaggagtgcccagagaagggggtacggtccgaggtcgagcaggcctcctccggccagctcgggcgagatcatccggctgtcggccgggaggttgggcaggtcggcgtcgaagccgaggtcggcgtaaacacgccggacgtccccaatcgccttgtcgtggcggatgagtttttcaatgtccatcaccagcggctggaaacgcgtccagacggcctccatcaggaagaggttctgagcaaagtgtgcgagaggcgatcagacgggaccgattcgggacatcagagacttgccaggagtgacctaccttctcccgggccagcgcgatgagggcctccgtgtccttgaggttgacagtgaaaggctgcggacgggtcggcgatcagttccctgtttgcgacgccgaggcgttactgagatacgcaccttctcgcagagaacgtgctgtaggatcagtgcgagggaaggcgtcagcggtgcgcgcagcatggcggacgaggccgggtcgagctggggccgaccttgccggcctcgagggcctgcctgaccggctcatagtgctcgggatgagtcgtaccgacgtagacgcagtcgacgtcctgccgtcatggagtgccgcaatcacaaacgagcgggtcagtagacggtcggcgtggtgccggagagctcgtcgaggcgagcaggctggaacgcaccgggtcggccatgagctcggcatagctgccgtacgcctttgccttgctgttgacctctaagactgacttgacaaaaccctcggcccgagagagcgagcgagcagcgacggcgacgaccttgtgtcggacggtcgattcgccgcggctggcagggtcgagcaggaggtcggttgcgaacgtcgtctgcgcagggagcaggttgggcagggttgcagcttcagctcacacgcttccggacttcaagaccccagcaggagggctctcaccgagatgccgccagcgccgatgatactaataggttggggggggggcaagcagcatcagcgcctgaggagacgtctaggccagcggcgccatctcggcggcatcgcgagagatgcaaggccggacgaacccccatcggagcgtgaagggagaggccatggtcgagaagtgaaaagagtgagaaggtagaagacggtccgacgtgctggctttaaagagctgagggggttagatccgagatgattcggagagacttgggcgcaacgtcggagggaggaaggcggatccgagagtgctaacgaaactctctgccgcagcgcgctttcgtctcgacagccttcttcctttcgacgagaggatgcctttccagccctttccttcggtttcaacaatcatgtgcgatcgccgagacgcctgagctcaggccttcttgccgaggtcctctttgagcgagacgatccggttgaggacgatgcggtcgccttccctcggaccaggagcgacaccggcctcctcagcgaggcagccgacctttgcgtccttgtcgagcgcaaagtaggcgacgcgaaggccctggaagcggacgcattcgggtccgagcagctggtcgaccgtcggcacgggcgtgtcgtccggtccctctcgcgccgagtggtcggccttcttcgcaccagcgagcgccttggccgtccgctcctcgccctccttacgcgcgtcggccattgaccgcttggcaaaggcgtagaaggcaggctcgaccatcgccccgcggacgacctcgagcgagttggggtcgatgtcggccaggtagtcatcgagactggccgggtcgtcggaccggaagagcggatggaagatgcgcgtctcgtcgatgatgatgggcgaggatgtctccgggtcgagcggcacccactctaaatcagagcaaaagggaggcaagcagcaggcttggtcagcagtcgcgcgtgatcaggcggacttttgaaaggatgtacggatgaaagccttcggcttctttgcgccctcgccctcgagccggacgatgacctcgacgacctcgccctcggcgtccttgacaacgtcggtgcacgtgacggggtacggcgcgccaaagaggccgaccgacttgctcggcgcgagccggaagtagtctgctgagtcctcgagccggaagtcggcccggtcgatgaagaccgtcttggtaaaggcaacctcgtacgtgcccatcgctgggatcttcgggtggagcggcttagaggtgacgatccggtagtcggccggaacgtttgaaatggtcagcttgagcggccggaggacgacgttgagccgcggggcggccgactcgaggtaagaccggacggcctgctcaaacttagcaagctcaattgtcgccgaggtcgtgctgacgccgaggttctcgacgaagctcaagatcgctcccggaggcacacctcgccggcggagggcgatcagggtgtacagccgagggtcgtcccagccgcggacgtggctctcatcgacgagctggcgaatcttgcgctttgacatgacggttccctggatgttgagccggccgtactcgctctgacggggcttgtagaggtcgagggcgtcgcacagccactcgtacgactcgcgcgcgaggatgaactcggttgtgcagagcgaatgcgagatgttctcaaacgagtcgacgaggcagtgcgtgaagtcgtaggtcctgcgaggaggggatgctcgggcgtcagcgaagagcaggcagacaagggcgagggcgagaacgaacgggtagatcttccacgtgtcgccggtgcggtggtggttggcctcgacgatccggtaggcgaccatgtcccacatgtgcgggttgccgctcgcaaggtcttgcttcatccggagcgtgacctcgcccttcttgaaggcgccctggcgcatgcgctcaaagttggcgagcgagtcggcgaccggtcggtcgcggtgcgggcaggccgaccggacctgcgactgggcgccgccccggtgcgcgagctgctcctcggccgtgcagaagcaaatgtaggccttgtcgcgccggacgagctcgcacgcgaggtcgtacagccgctggaagtggtcggacgaatacgtaatgtcccatggctcaaagccaagccagcgaaccatctcgaggatcgactcaaagtaggcgccctcctcggccgacgggttcgtgtcgtcgtaccggaggtaggtgtggccctgcttgtaggcggcgtagccaaagttgacggcgatcgccttcgagtggccgatgtggaggtagccgttgggctcgggcgggaaccgggtgacgaccttgccgccggtcgctgcgaggtgctcggccatccgggcaggattcttctgggcgttgccgccgggggcgtgcagcttcgagaggaacccctcggcatacatgttgcggcttgcggtgccgctcgacgatggctcgcccaacgacgaggccgatgcggcggcagccttcgccggctttgcagcctttgtcggcctgggctcctggaagaaagataggtgcaaaggcagatgacggcggtcagcgaagtctgctttcgggcggaacccctaagtggcgagcgcacctttgcccggcgctctttctcagccgcgaggctgccgaagcgttcctcaaaggttttctcgagagccgtcttgagctcgagcggggccgcccaccggagcgtgctgtcggtccggagcgcggcctgggccttggccaggtcggaccaggatgtcggcggcactggcaggccggcgaggaagggctcgagcaggctaggcagggccgaggcggggacgtcaatgcctgaagacgaggaggcagggaaataagctcaaaggtcagctatagcattcttgaggaggatgaaatcgagtcagagtgactgaccgacgcccgaggcctgagcgagccggtcgtcggccacggctggctcggcctcgacgagcttgacagcggccgtcagcttgtcggcccggtcgagcttgccatcgtggatccagctggcgagccggagtcggctctcgggcgcgagcttgctgctcgcagggacaagggcggcgagcagcttgcccttgccctcatcccaggtcggagagtcggccgggagagcggcggcgaggtcggtcgcccaggtcgcctgcttcgggttcgaggcgaggtcggtcgccttggccgaggggacggcaaaggtcgtctggagcttgacggcgagcgcctgctggtcggccgagagcgtcttgggcggcatcgtgcagtcgggaagaggtgatggtccgagtcgaagggacgggctggcgagcgagagccgcttcgttcgtgagagcttcgagcctggcgcgcgcgctcaagaggaaaggcagatgcgagtttgggctgacgcgccgcgtgcgatcgagcaggcgacacgggcgcagactgcgagtcccccactttgctctgcctttgaccctctcaacacctcttttcctccgaggatgctcgtcgccgctcaacagcagcagcagcagcagcagcagcaggcacagatgcattcgtcagcaccgtcctcggcggcctcgtcctcgtccgccggtcgacggctcggtcctgcccgcgcgagctcgcctctcgccggcgcgccgccgccgcaggtgcgcatgctccagccgaccgtcaatggcaacagccacctcgagatcatcgcctcgtcccgaccggcgagcgcatcctcttctacggccgactggaaagccttggccagacatccgacatcggtcgcaaacgaccaggcggcagggaggctgggcccacccccgccgagaccgccccgcgcgcccgctccggcgtcgtcgctgtcgaccccgctcggcgctcttggccctgctttgctgagcccgtcggcctcgtcctcgcgctcagcctcgcccgcctccggaaatggtcgaaggctcgtacccaagtcggcaaagtcgtcgtcgactaccatgggccggccgccgctgacggccgccgccctgcctggcgcgccgccgcttctcttaccgacgtcgacgtcggccggccggcttgcacctgcgtcagcggcctcacaaacgccgtcgagacccgatgcttcgtcgcagggatccgaggacggcccgccgggtcagggcgatgacgacgacgacgactcggatgcctcgtcctttcacgacgaggagctcgtcgacctcggctcgtcctcagaggacgaatttctcgccctcccggccgtcgtcgttcgctcgggcgcgctcggcgaaagtgagagctctgccgagagccttggccgtgtgctaggtggccctgacaacggcaaggggccgcagccgcctgtccgggactggctgggcgcgcctggtctgccgccgtcgacgacggcgacagctccagccgtcagctcggcgctcgcccggccacctcggacgtcttccttcccgagcccggtgcaggactcgccgtcggtcccggtccgggctcagcgggcagggtcgaacggtccaggagcgctcgccgccgccgaagggtcgcatagcagaactccttcgatgagcgaaaagctccggcgagagctgcctgccttgcacacgacctttggcggaccgccaactgagcaacatcagctgccagcgtcgtccaaggtgcgcgagcatcagcttcatcagcagcagcagcagcagcagcacggtggaccccggtcggccgtcgcctcaccaccgccttacgcccacacgccgacctctgcgcggccagcccacgctgcggccgacgacgagaccgacgacagcgttcatgctcaccgcgacggctacaccaactcgccctcgctcttccgcctgcccgaccttggcccgtcctcgtccagcggcggcggccggctcctctcgcctctcggtggcgcgagcgtctcggccgggccgaacaggtcgcacgcacgcgcgccgtccgacgggaagctctttgacccgtcgtcgtttacgctcggcagtcactcggccagctcgccggaaggcctcgtcggcctcctcgcttgcagcagcagcagcagcagcagcagttccgacgccagatcttcatcctcgagcaagcgcgcgctccgagcagtcctggacgagctcgccatccaggacgtttttaatctcttttcggccctcggtcagcagggccgccgggagctcgaggcgagctcggacgccgtcgaggagcttcgcgtctgggcccttggctgggcgggctacgtccgcggcgcgctcgaggttgcacacgggcgtgagggctgggaccgtgtcggttgggccgtcatccttgacttttgtgcgtcatctgctgccccgagctcactgatacgattgctcgcctgacaacgtcgtgcttctgcttttgcactcaatcagtgtcggccatgctcgagccgccaacgaccgcctacccgccgggccaggtgctctccatctcactcacgacgctccttctccgggcctcgcacgccatccggccaccggccggcccccatctcatcccgttcgaagaggaggacgtcctcccgccgccgctccagccgacactcgccgcgctcaacccgaagacgcgcatgcgcggcctgccggccggccggctgctcgtcctgccatcgccgctcgctgctcagccacaacagcagcagcagcagcaacaccaacagcccgcgtcagcatccgcctttggtctttctggcagccagagcgccatcgacggccgtaacgggtccttccctccgccagccaagggcagtgtccgctcgcgccggtcgagcatctcggaagctgttggtctccattggggcggcggcagctcgcgcgcgcgcgcttcggcggcccacacgggcggtgcaggcggtccgccttcggcatttggtgggctcaaccagcagcaggcgttgccgctcaagcttgcgccctcgtcagcctccatctactcggtcgacaaccactccaaggcgaagctcgcgccgcctccgccgagactgcccgagcctaggcgttacgagttcccccagccggctggcgtcggtgccagtgccggccgccagcaccggcgccaggcgagcgactcgcagtcggtcatgtcgtccgccggtacgctttcgtttggcaaccacgcgccgagctcgatgggctttcacccgcactcggtccaccgtccgcggggcgtctcggccggaccctcggcgacgagtgcgagctcgagcagccagatgctcgctccgagcgtcgccagcggcgtatcgtcgcccgacctctccaatggccaccggagctggctcgccgagctcaatgctgcgccgcctgtgccggcctttgctcagccgctccgcaagagctcgtcaaaggacggctcgtggacgtcacttggcgccggctcgtcttcggctcgcggcggaggttcgcattccgcctcggcctcgctgctcggcggcggtcgatgggacacggcttcgtcgtccgagtcgtcgtcgggccagatgacccgccggcggtcggacgaggctccgctggccgagcctctcttcctctcgctcacgagcccctaccggtttggtcgggcgccgatcatcaagattgtcgtacccttcccggcggatgtcgtctggccgtctggcccggccctcaagctctgccatcggcacctcgacgcgaccggcctgctcgccaagctccggctcggcgatctcgtcgagaacctcgccgtcagctggcgctcgcgcaagaaggagggcccggccggtgcaagctggacgaccggcacgatggtcttcatcccgccgtacctccacccgctctcgacgacgcatgccagccttcctccggctggggcctcgcccgcgacggcggtcccgtcgccctcttcgtccaagacggccgtcgccgccagttcctcggtcaacaaggcggcccacctgccggcgagtctcaacatgttcctcctgccgccgacgtactaccacagcgttgtcccgccgccgtacatcatctacctcgatctcacgcccttcgctggccgcgtgaccgagacgctgcggctcgccaaccagcgggccgaggtcctctcagccggaggcgacgtcctcagcctcgaccagtgggtccacgaagcaggcttctttgtcgaagagaccggtgccggtggcccgtgggagggcacgatggtcacgctcgaagccgacggcacaaaggaggtacgttctgaccagccggcctctgtctgcgctcatagctgatccctcttcttgatcgtgtgcgtctcctgcagggcaaggacgagatcctccgtcgcgttgattgcctgtctgctaagcgccgaccgtgggaggtcgtcgccgccaagagcacgcgcggtagcgtctggctcaagttagtcttcagatagcccctcctttcctgaggcctctcgctgaccctatcggtcttgacccattcaggctcgttcgcgaaaccctcccgtcggccgcttaggccatccgaactccctgcacctgcttctgtccttcacctacacacgtcacctaccagtctcgatctctctgcttgtcaacacctgcttgcccttcccttgcttcgaatacagctcagccccatcggcatttgcctcttttgccctggacttcccaaccccatattgtgcattctcgctgcccttttcgtcaatagtcacgcacccactcactctctggcctctgttcctcgtcggactcgcatgcccagcccagcctccttcttgctaccctgcgcctgcaatctgtggggcggatttataccaagcagaccgagagcgcgggaaaggctgtcatcaatgggcgatgccgtcaccatcgccgatcaaagggcgacgacggcctgctggtctctcctcgttgctcgagtttgaagacctccgagcctccgtcatcaaggtcgccgccgagcgttcgctcgtcgtcctcatcgatcgtactcaggcttgtcttgcgcgcgctgccgacgtcgcttagcgacgacgaaaggatgatgttggtgactgcgacggcgacgagcagcacccaccacaagtggccgccgagaagttttcggctgctgccgctgcccgccgacgagtctgaatcggacgacgtatgcgatactgcaaacagggctgaggcggctgccgggccaatggcatacgcgagggaaccggccatggtcgtcaggcctaagtagagcggattagtggctcatcagtctcgttcctctgtcagcgcaatgagatagcagcgcaccgttgagcttcccgagcgccgcaggacttggagaggacgagttgacgaggatgaggacgatcgagcccgtgctgagcaccggcacggatacaaagagggcaaagtagagtaaagcccaaacgatccaggaaagccgagcgccggccggggacgacgtcgattcagtgacaatggcgagccaattgatcgtcggcaggagcacgaagagcaagacgtagcccgcgcagaggatgcggtagagctgcttgacgccgagtcggatttgcagctgcgagcgacagaagaggggcgcgagatggtcagccgaaatcgatgctgagctcgaaagtctacgacgcaccactggcaggaacatcagctggaagaccaacgaccaggcgcccgtgcaagcgagggtgaggccaatctgcgaggggatgagcccgaggccgccatctttgatcgggctgtaacagacgaggagatatacgcctgaccaggcacctgtcgaggagtagaaagtgtcagggttgatctcagctgtcacgggtgagcgatcaccgtaccttgcgttacgttcaggctaaagcagcaaaggatgactctgttgaacaagagttgacgtcagcacagagcctgctcgacggcggttgacgcactgacgcacctccggatggcgggcagactcagcagccgcccagcaggccaggcatctttggacggcgcagagctgcgagcaccggacgcagttgccttgcgaaaggcagcccagactaccgaggggctgcgcatgtgcgaccggaagggcaaaaggcgggcaccagccgggtatgaggatgctggcgtcggtccgagcagctcgtgttgctcaatctcgtcgccagtgtcgttgatagcctcataggcagaaggcgcgaccttgacgagcgactcttccaagaacaggtaggcgaagatccactgcggtgcgaggcagcagaacatcagcacgccgctcgccgtcgactagctcagtcgcacacgggactcacgccgagtattgataagccggaggcaatgccgcagggcagaaagtaggggtacttggtaaggaattgagagccgccgaaccatgctgggaagctctcgaccgggtgcgaggtgtagccgccgagcagattgccgaggatgctgcctgaaatcggagtctcagtcaccggctcggcagtgcgacagaagaggaactgacctgtcagccagcagaggccgtacagtggaaaggctggcagaagtgtgtcaccgacggtcagatcagaatagccgtcaaggaacggcggccggacgcaccgacggcctggttcgtctcgtcctaaggcgcaacattgtcagtccgaggacgcaagatttagcagcccgatagcgacgcaaggaacggacggtcatttcgcccagagaggccttgatgactgcaacgtttcccgagaggcagcccgccaacgaccgggcgaacatcatcatgccgagcgaccgcgagagaccgaatagggcgcctgacagggcgacgccagcgactccgcagaggatgaccggccggcgaccaatccggtctgagagactgccccaccctggggtgcggaggatgcgttatgtcagcagcgcaggtgaaaacggcgggtgctgaggagaggccgttggagggcagcaacaagaggatgaggaggatgaggaggggcagatctcctgggccggctgcgggcagccgagcctgcagacggacgtacagaatacacagctaaattgagcgagtgcgaagacgccttcgctgtgagtcggagagggacaccatgcacgtcagtgccagcacgaaagaacgaacgatgcggttcgagcgcacacgaggcccgaatagaagccgaccgattcaggcgaaatctcggtgacctcgacctgccggttgccgcagcaggctcggtcagcctccgcggttcggtagagagcgagcgcctctgggcagagcgtacgatctgttgattgatgaaggggaagatgatcgagtagtttctgcatgcaggtgacgagggaacggagatcagtcgtcataatctctcgctcagccggcggagctcgccgacgctgcagcggaacagctcagcccgaggcgactcacacaggctcggataggcgaacagccataaggacaccgagctggcgccaaggtataggcgtgctctcaggtggcagctggccgatcccaaacatccctgtgctcgagttaagaggcaactaggtcggtctggctgaagtcgcggagggagggttgagcaggccaggcgcgccgcatcggtcgctcgtcggtcagtctgagctgaacctgcccttgcacaagagttgaggacggaccttgcgagctcgaactggagcgtcgctttcgctcgactgcttgacggggaggcgtgccgaaggaaaaaggaaggaaggtgagggtcggaaggaggccggcacagtgctgcacagcgtcggggcaccagagtccggcggcccgaaatcgggacgacgtgcagccaagcgtacgggctcaaaatgtcaatgactgcctttgacgaccctgtcgaccaggaagtacgttcgacaaagcagatggatacactctgcgggagggcaggaggcggggttgcgagcggcgtccgaagaggcaccgcggcgcgcgcagggtgatgaggctacaagcagatgcggcaggctaagcaaggatggagaagaaagagaggtgaatgagtgcgatgcggtcgtctatatatgacaagaggggggtgggggttggtcgtcgacgaggcactcatcgactgggacaaggttggtcgccgtcagcgacagagacgcgcatgaacagaagtcgagcaggactcactgccgtcctaggaacatctgtacgccttggtcagccaggtcggcagtcagtggcgtcggccctgtagatcgttgacgagggcgtcttcagtcagcctgcagaaagcggagcagaagccaagggtatggcgagacgcacccggtgcaacgtattcggccagcggcgtgatgacaaagtcgcccgtcgatatgaaggccagcgtctcgtgggtcggggggttggcgggatcgccaggaggcctgtgagaaggggaatgacgctgtcatgaggcgtgatggattgcggcagatgaagagggatggcggacgtacgctgcgatgcgcatcagaccgacgccaagccggtaggtcccgcgagtacggaccgagacgtccgggaagacaaagtagatgccccgctggggctcgtccgactcgtcggtgcgaagggcgagctcgtgcggggaagagacaagcgtgccatagagcatgcgcatcggctgcggattcggcgaggccgagtcaatcacgacgtcgaccgcgtccgcggcatgctgcgtggtcgaaggagcagcgctgccgttcgaagacgatgtgccggccggcgtctcggacgagggcaacagggtgaggtggctgaataggaacggcaggttgtggtcgctgcgggaaggtcgaagaggagacgctgttcagcagtcagacgcgagagatcgaagcgagacggcgcgaagggctcacatgttgaccggcttgccctcgagatctgtgcactggagctgcacgatcaacggcgggctgagcgggagtcgcgaaagcacgttggagccaaattcggctgagcctgtcggctgctggacgaccgtcagaacgtagcggctggagggcgacgtgagggacagcagagcaaattgaatcagcgagggcaagaagagagcacgagtcgatcaaagccccgaaacgcaccggttgctcgtgctcgaggtgttggagaccgagctgccgccctcgctgcgctcgtcgctccgatggctgccgctctgctcggtcccgtccttctctacgacttctggtcccgcgctcgtgcgggcggtaatcagcgttggggcgagctcggtcgaggctgctgcgccggcgccagccgtcgccttcgggcttcccgacaggttgctcatgggctgtcgaggtgggcgagagtcgtgtgttgccttcgagcgagttgcagcgaagggctgggggtcagtccgagggtagggctccgggagacgtggccgacggggagagaaggaggcgttcaggcgggcggtcccgactcaacggaggaggcgtctggggcgcggcctggcgtgcagaggcaggctggaggtccgaggcttggcgggctggcgggcgttgtgcgaggggtcgtctggctgctgttcgctggagcaaggactgggaagagggagagggggcgaagagggcgtacgacgagggtgaagctttggccgacgcctccttaagggaagggggacgggcagaggtgccacacgacgccgcgtcgattctcctccatcccgcaatctccgtcggccgcagacagaggtcgggctcggtcgggcgtcagagcggggtcggtcgcgcgtccggctgcaaacgcctcgttcgccgggcgtcccttgtccttttgcaggtgggcgctcggagagtcaggatccgttccgctcgcccggccgctcgggcccaggcgtttgtgtgtctcgacgctccgatgcaggggccgaagagagcgatcgaacgaggcgtcgccgcgtgcaaaacgccactgactctgcggctggagcagcgcaccgatctccatgcgaggcttaattcctgccgactcgcgcaaagctgctgccctcttttcaagtcagacaggtggcgatgaaagcggagggtatagggtcaaaggagcggaagctctcgtctcgtgcgcacgaacgaggagctgcagcaagataaaaggtcggcctgctcggcgggccgactcctcactcgtcgatgagcccgcggccgcagactgcagagaccgtaaagccgggtcggacactcggacacttcctcctgcgacgtgtccgggcgacgcgccacgtgtccgggtcggggcaaagtcaaacgggaggaggcatctctcggctgatcgtggacacgtctcgccgacttgtgtcgacgcgccacggggaggggcgaacaaggccgtcggagaatgagagcatgtctcactcctcgacagttcgaagagggcccaagcccgatgctaaacgcgatgcgttcgccggccaacagagtgacgaagccgaccgtcgagacggccgaaggtgtccgagaagcgaatcagagcccgagcgagcagagcgaccgccgaaccgccacctccaagcttccgcgacgaggcggaacaagtggagggccggcttcaatgaagggccgcctctggtttcaaagcgtccggtgcgtgcgaggggcgagtcacatctcagagtcaggcgctcgtctcaaggtcgaatgcccaggcgcccacggccagcgacggctttggcgatgaagcgagcaggagtatgtacagtagggtccgtccgggtggtagccggacgccaccgatggaggggagcaaatgggcacttgctacatcactcatgcccgggtgctcttgagcgaccgtgatgcgccgggtgtggcggccaaggtggggcgcgagcatggaacgggacgaggttgagcggcagcaggcgctcgaatggcagcactagcgacagacacgatgagcgatggcgacgtgagcttgctcccgcgcaggcgaggggacgacaagcactgaagggaagcagttggtaggcgtggaaggttgaccttggcgatggcgatgtcgaggaagaacggggcgacgacgcaacacggtgcccgcgaggcacggggcctgactcctttcggttggctgcacaacacatgacggcggaagcgcagtcggtgacgagggtaagcagatggatacagtgaagcaatcgcgaacgtcggctgcgaccaagcgatgcgtagaccgaggaccctgagtaacggaagtgggcgagtgagcggtcggccgatcgtcggcatccttcatgcgacagggcccggggccgacccaatcgcctgcttcgggtctcccgctgttcatgatgtctggcgcaagccgtccccttagtatcagggtgcggccgagccaaggtcgaagcgggccgccctacttctgctcgggcttctcctccccgggtgcagaggccatcatcttggcaccgaggctgcggacgttctcgctcgcgcgcgtgacgccgagcgtgcgcgcgcactcgtacatcttgagcgcctcctcaaactggccgactgcgagcggaaggatgagcgtcgagatcgaagcacgatggaattagctcaatgttagagcccagcggactgttgaaggaaccgcagacgcacgggcctcgagcacggcagcaaggttgaagttgatctccgggtcgagcggcgcgagctcgtgtgcggcgctgagaatgcaagcaaagcctggtcgacgcgtcagttcacgagacagtgggcgagtctcctcgcttgccgcaggacttaccggaggtgcttgagagcgaggtggcccttgggcgtcttcgagatgatgtaggccgaggcgaggtctgatttcgagagagaagggctggtcagcgccggcaccgacagcgttgtggagcacctggatggactggtatgagcgtcgctgttcatgggatcaagggcgatgctctcgagccaggaagagattgcggcatcgtggtcctctgtgagcgagccgacggaaggtcaagggcgacggtcatcagtgtgagttcgcgaagcagggcgcgtcagcaagcgggtgaggaaccgctgcaagcggcagcggcgacacgcactcaggcagtagttgacgacgccgaggttgaaaaggacaatcgcgtcgcggtgaatggcgagcgccttgaggtactcgccccgggcttgatcaaaggcaccctcttcgagagcgcgggcgccggcctcgagcgcagcttggaactcgggcgtcggcttgtcggacggctcgggcgtcgctgaaggccggcaagggaatagtcagctgtccgtatctaacgaccgctggtacgggcggccactcacgctcggcaaagcgggcgaccgagctggcgaacgtccgtcggctcgcgaacgagagccgcgagctgaccgacgccgacgacgcggcgcgggtgccagcaaggaagccggccggccagagcgcggcaacgggccgactggagcgagcggcggcagcgcaggcgcggacaaaggagcgcgagagaggggcagacgacatggcagcgagacttggggtgatggtcggggcgacgattcgctctcgaggctgcctgcttgctgctcgactgcgtaccgtgctcctgccgaggaaggcacggcccgccttacgctcttttttcgttccgcgccggcgcaggttacgcggccgcccaccgccgcctccgtgccctcgtccgcccgaccgctcgaccgaccaggccagcagctccgatcctcctcgcacacgcacaccccgtcctcgctttgcctctctctaccaagcagctactccgcgcaccgagctctctcggccaacgcttcgcaacccgttcgccagcaacatcagcgactcgcgccgcactcagaggcaccctccacaggctcgctcgcccgaccctccgcccaccacctgccgttcgccgacgccgacgactccgccgtttccagctctcagcgctcttcgtcgtcctcctgcctccgatgtccttcacgtccttcctctctgaccgcgggtcgaaacaggcgccggcgccgtcagcagaggcctcttcgtacctccagtcggcaagcttctcgcagccgtcggcctcgtcgtcgttcgtgcccgaccagccccagcaggcacctgaagcgaccgcccagtcgctctttgcttcggccgcttttgacccggctaagcttcacccgttggctgggctcgggtcggaccagcagctcgactatctcctgctcgaggacgacaagactaacctcgagggcggcgccgtcatgggcaaccgcggcttcttcgacgacgtccaggccggtaccggaacggcctacatttccggtacgtcctctgcctcgtgcggttgctccttaggtggtcgctgataacggctgcctaccttgctgcgctaccaggtctcttctcgggcagcgcgctcggagctatggacggcctgcgcaagaagggcatcgtcggaggcaagcttcggtggaacgccgtcctcaacggcgcgagcatgcgcggcacctactacggcaacacggccggaacgctcggtatgtctgccttggtcgtcgacggcagccagagccagcctgcagtctagccatggctggctcagcgcgggccggcacgtgcctcgcttgccagcgtgccgcaacgctgaccccattctgcttgcatctgcttccatcgctcagctttcctgtacaacgtcttcaacaacattgtcccgcgggcacggccagacaacaagcaggacgtttacacgtcgatcgcgtcgggcgcgctcgctggcgctctcttcaagtcgaccggtccgtcacgctctgcaaccagctcccccttcttgtcgcgctcgagactgacatcggccgttttcactcgcagccggcctccggccgtgtctgactgcgtcggcaatcatggccggcggtgcggcaggctggaattacgcccgcgacgcctactggaagtaggacgcgcgaggagtgggccggcaggacgccgactggatagaaagacgcaatcacacctcctcggccctggcagagggagggaagctgactcgagtcggaacagggagggtttcgtcgggtgctgggctcggtcggctctcaggcagcactcatgacgctcctgccaagccggaccttgattcgggccttctaaagtcttcgccgcaacgctatcgccagcctttatcgtggaaagtcaagcggctgcagtcgctgcggtcgggcggagcaaatcgaggcggtagtcgggcggtgatagggcaatcgaccggcaacaggcacgctcagttggcaccgtctcttgctccttccttgtcagtcggtgctggaggactatcctctccgcgagctggcttgctggctgcaggtagcgtctgaaggtgaaggagaaggtgaaggagaggaggacgtcatttacgatcgggcgtgcccctttttttcccgcctgcctccctgtgaaaaggctgaccgccccgcctcttcggcccacgatcagcctgcgatcaagtgcttcaaaacggcgcccgtagattgtccggtgctcctacctgccctcgagcggcgccgcaaggagctgcctccgtgcccaccgaggtcagcccgctcggctgcaatacttccacgctcgacgcccctgagtgactcgtttgccttcacgcacgcgggggcccttgcctcgcccaggccgcatcagctgtcggcttcgccggctctgcttgccaatcgtcacaggagggatgctgctccggtctgcggcgagagtgcgagcgcccgcctttgaccgcaacctcagctgacaggagttgcctgcctgtcgacgaccaccctctcggccgacttccctcctatcgcctccctcttgaccgcctgtcctcctcctctcccgtcctcgctcttcctgttccagctcaagagctgtccgccacgcccattcagtatagacccaagacgcggccaaccttcagcaccgcccggacctcgtcaccttccgacgcgtcccgcagcgtcatgtccggctccctcccgtccctactcgacacccctcgggccatgaccgctcagctgccaacgccgaccgcatacgattacaagcggacgctcgccgccgctggctacgacgcgcccttctttgagcccagcttgcagccgtacgaggccgggtcagtcgcgctcggcctcggtagccttcctgagccttcccgagctccgaaccggctgacatgagcaatcgcctcttatccccactccagccctcttgcaagctcgtccgactcatcgtcaagcttctcgctctggtcaaaagcgtcgtccctcgtccggccgaggagcggttgccttgcttcttcagccgtcatctgccgctcgaccgcatcatctcaggcttccgccgaggaacagctgggcttcagatacgtcgtcgagtcgtcggcggatgactttccggcttcagcctcgcctatcacgtctcggccctcgtggctcgctctcatggttccccggcccctttcgttcgtggagtcgtcccgcccggccctcctcttggtcgatggcggacgctcggcctcgccaacaccctcgttcatgagcgccctctcggcgggcgagtacaatcggaatcgggcacagcggtcccgttcgaatgccgctggcgacgcttcggtcgacgcccccccaagtccgatcatgctttctcacctcgagcaccggcgccggtcgatgagccccgtcctctcgaacccgttctcaaacgagcctgactgccgcatctcacactggcggagccgtaccatctcctcgcagccgccgccgccgccgccgccgcctgccggtcctccgccgacggggcctctgccgccgacaccaccggcagagcccgtcgagcttcctccgccaacctactcgctccgttcgcgcaagcgccagtcggacgccgtcgcacgtcagcgagccgaggcacgggccgccctcgaagggcgctcgctgatggtggccacctaggtcgagactcaagctctgccaccggtctcttccccgcatcatcccgcttacatgcggcctccgccgccgactctagtccacttctcgcctcatctgcctagcttgactcttactctagtcctctctctcaatcctatgccctgccgcttgcctgaccctcctcgtacttacagcttagcacctcccaccggcctgcccatcattatgaccctgcaacgacctgcttctccgtcgcaaatgcaaaatagacaaggcattgaacaagtcccagtaggcgccgccgtgacggcctcgcgaggggaggacaacagcaaggtagggtgtgccagcggtacaagggaaaggagggatgtcgtgggtgaagcaagtaaagacgagggaggcgcgctgttgtgtaggggggcgagtcgcactctaggggaggtcggagaggcaggcgcgtgttttaggaagggcgtcaaacttaggcgagcggcggcggccgaggcttggccgcaaagataccccttccgccgacgggtcggacggtcgtctgaccaaagtcttcgtggatgtcgagcattgccttcaaggcgtttttggccctgatgcgtgtgatgtcgtagtcgggccggccgaagaggccgccggcgagcgggctggcgaacgttggcccacctgccgccgccttgtcgccatacgggaaggggaacgtcttcttgagccactcgtagacggcgagcgtgacggcaaattggggcgagctccggatgacacgggcaacgccgcccttgaagagggccttggcgccctcctccttcgtgatgacggtaaaggcgtcgaacatgcccttgtactgggagcgtcgagcgacgcaaggtagggcaacgagggtcagtcagaggtccgccgggacgtctcacgcagagtgaaagagacgaacatgagtctggccagcgcgggcctcggtctgcagccgcgtcttaacgacgtcagccggcgtcgtcaggtaagccgccggcatgccgcccatcccggccgctagcagcgtctcgaggttcgagagctgcttgccgttcttgccctcgccaaagaggtccttcttgaggtgggcgtacgaggtgaaatagatgagggagaagggcgcgtcccgaaggaggcacgcgccggcgcccttgtagaggccgacgaggccgagcgagcggatgatcgggaagacgccgcgggcgacctggacgccgtccttagcaagttcgccctgcatctgcagacggatcttggtgatctcgagcgggttcgtgacgatctgggcccgaaagggaagcggtcgcgtcagcaaacggatacgagcgatcacgagtcgcgagcgatctacgcacgacctgacccgctccggccgctccaccggcgagaagctcctgccacagcttgatgcgaccggtctctgggtcggtgaaacgccgtcggacgaggtcgttgagcgtgagctgcgagggcgggagaatgattagtatcgagcttgggtttgtcgaaactcgccagacaagaggggcaaaccttgatggccttctcgggcgcaacaccctgtaaaccgatgaaaggtgtcagaaaacacgagatgaggcgcgcgacagcgctgccgcttgacgcacgatcatctgcggcagcaggcccttgtagaagccgcggataccgccctcgttccggaaaatcttcttgacgcaatcgaaccagttcttgtaaaggacctcgccgacaacggtcgagcgctggttctggagccgcgtcttgaccatgtcgctgcggagcaagacgggataggtcgtcagcatggacgcgcgcaagagctgaaagagcgagaccgggacggcctcacatagggctgcgaacaggatcgatcgtaaaaaaggcaatcggggcgtcagaaagacgagcaacaagtcgagagaggcctggcagaggcgtcacgcactagacgacaaaggcgccggcaccgccgccgatgccgccctggatgaacgcgtagagcttctcggcaaaggcggacgctgtcgatgcggcgctgccgccagtcgtgtgcgcgtcctcaacggcttgcgggtgctcccactgcaagcagacacaggcagcaaaagtctcggtcagcaacttgcggtgcgataactcgcgcagacagcctcgagccgactgaccgtctcgtcaaggagcgcgcggaagtcctcgaggtcgagccgcgtctgtgagccccgaccgcgcgaggcaaaatgccagacgagctgagcctcgagcggcgagatgctggtgtagcgcgactcggcggcagagtagttgagcaggtcgtgaacgtcaatcttgccgtccctgctcttcgcgacagctgcagaatgagcaggaaggctaagagtcagttgtggccgccggaagctctagggccagttcgcgcgcaccgtcatggatgaggcgctcaatcaacgtcatgtcgcgcaggacgttgtggaacgccttggcctcggcatagctgatcttctggccagggctgagcaggcagagcgtcggcagccggtcgaggaccgagtcgctcagcttgtgccgggcaatctcgataatgatccgcttgaactcctcaggcgagatgtagcccgagcggtccttgtcaaagtagcggaacgcctgccggagccgctcgccttgtaggcccttcagaagctggctgaattcggcgtctgcggcgtgagatacaatgatcgtgcgtcagctcgactggtcagcgtccgaccagtgccgcagcaacgcgacgcacagccgatgacattcttcttgccgatgtagagccggacccagtcgctgctaaagtcgaaagggatcgcatccgggccgatggcagacgagaagacatccttgaactcgtcaaacgtgatcgagccagagccatccctgtcgaggtgcagagaaggctcagctcattgctgatcgacaccaatcagcttccgggacgcactggtcaaagtaatggaaggcaatctggtagtcggcgtcgggcagctgtgcgagagaaaggacaagctccgtgcgaaggtcagcagggtgttcggcaccacgaggtgacacgagccgcgcgcgtatgacgagccggcgcagcaccatgcgcgcctgctcgtgcgaggcggatcaggcgtccgcaccttaagcaacgactcgaagacgacgaactcctcccagctgacacggttgcgcttctggaggtcggccaccttgaagactggtgacagatgggcgataattgtcgccgtcagcgtcagtctgctgtacaaaagtcgggggacgagaggaggaaggcggcgccgtgagacgtacggacgccgtactgctcgcgccggattttgctcgtggacgaggcgtcggtcggggcgatggccgagacaaaggcctcttttgtcaggtacctggccgagcaggagttgcaggtggtcagcgtcaacgaagactgaccgaccggctgccggcttcagccgcccgcgtaagaccgactcggctggcgtctgacctaaatgagcagatgggacgtacttttgttcgctgccctcgatagggactgcaaacgactcgaagacccgccgccatttcgagagctcggtctcggacgggccgatgaggccgctgatgcgcgagccgagtagggagatggtctgctcgagcggcgacgacggctcggctggcgccgggacagtcacactcgaaccggaggcgtcggtcatggcgttgagacgagaggggacttgaagtcgggtatccgaggcaagtatagaatttaaaacgaaggcaaagcaaagcggccagagaaaacggtctggaggaggggagccgcgtcggagggggaggagggacgacctgctccggaggcaggcggttgtcgcccagagaaaggaccggggggatggtgcagcgcagagagtgtcagtaccgacagcctgtgtgcgctttgaccgtgtaggacgcaccgtctaagctctacgagacgatctgacaggtgaaggggtgagtgaaggaaggaggccgcaggcaggcttccttgccggccttgccgccttgtcgcgcggcgccccggttctacggcccgtccaagcggtttagcccgcagcaccgcagtggcgaccagtcaggcgcaagtgcacctgtctttaataagatgggttccaagctcgctcgcatgctgaccatgcaaacttgactgtcgcaggagggaggagacactcggtcgacgcaggtgcgacagccggggacaaggtcgcaattcccggctcagaagctagacatgcatcgagaagatgtacgagggggtgccaagcccagggtgcgacctgaatagttcgctcgtggagaggcgctctttggataggtgcgtcgccgctcggtcgggctcggccggcccttcgtgcgtgtcgtcaacgactaggcaggcgacggcgcgccggagccagacgggccgggtgagaagccgtcgatggaggtcgtttacaacgtcgcgcagtaacgagagagcagcggcttgccggcgcgaggctgatggtcctgttgtaaggaggtacgagggtcgggcggcgatccgtccgtgcctgccggctggctcaagccttgctcgcccgggcagcgaagagcttggcccaggggtcctcgaagaaggagtctgcgcagagcggaagagttcgttagcgatgggcgcagagggaccggtccttgaacgacggcgcacctcgcaggtacccttgctcctggtgcgcgaagccctggctgtgccctccgccgccgccgccgcccctcgtcggcccgccatccgttcgctggcgctgatagagcggtggtccagctcaaagtcagcgtctgagctacagttacagcctgccaacagtcgacttaccttgttggctcctcctccgccgccgtcccgaccaccgcccgctccactgcctgcccgaccacctcgcccccgctggccgccgcctccgccaccacgaccaccgcgtcccccgcggcccgctcgcccgttgttgtgctgttcagggacgtctggcaggccgcgagcgtcgccaggctgggtctgattgctgcccgaggcgtgctgctgttgctggggctgctgccgcgcgggagtcgccttcttgggcttggcgacgcccgagaacgagctgaagcccatggccgacatgtcgatttcggtgtccgacattgccgtaggatgagcgcgtgagagactggaagacgcgatggaaagctgctgatggtagtcgggaggacgagctcggcctccgttcgtgcctctccttcctgccggcgcgacgctgtcgtcagtcgggcggtttggaggattcagagctcgacgcctcctcaaccttgaccctgctcgcccctcttccccatctcctcgtgtcctagacgcgcccctctgctcgccccgtcaggaccagagaggaccgtagtgcggagcgcatcgcctttcggcaagttccacggcgctggaaaggccctctcgtccagcccaaccgcccgcagcagcagaccagccagcctctcctccagacgtctctctgcggttcctcggaacccaggtcgctcaagatggccttcagcatcggacgcaacaagatgctcaggtttgtcgacttcacgaggtcgctatcgcgctttcagcaaccaccgttgaccccgttgaccgctcgccccccggcgctctgcggcgtcctgcctgccctcgtcgacgactcgtcctcgcttcctgacttcgcccgctgtccaggcaatatatcttgccctacttcttcttttgtctcgtctgctctgtcgtcgccttcttcatcaacgagccctacattcggccagagtgggctcagcggccggccgtcagcccgtaccagccgcacctgcctccgccgcggcacccatcgattgcgcacctgtcggccgtccagaaggacgcgctcctcaagctcaactacgaaggttcgctcacgcccctccattggggcaaggagcggacccaccaggccctgcgcgagctctatcgctgcctgatggacgtcacccgggcctgcgagctcacaaaccgcggcaaggttgtcattgccgaagcgagctacttccgctggtacctcgcgggcaaggccgagggtgagcacatctgggccggctcagtcctcgacgcgctgtatgcgattggctacacggtcctcatcagtgagagcgccgaggagacgaaccggctgtacgccgacttgtcgggcgccgtcgttgtcgtcatcaagacgagggacgaggttgaccgctgcgttgccgacgagggccgctggggaacgtgtctcgagtcggagcacaacacgcacggcatcccgctctggaaggtgcgttacgacagcgactgttcgtctccgcagctatcgctgacgttcatgacgggctgccagatcttttcgatgtacttcttcccgacgccggctcacccactcggctcggcctggacgctctcgcccgagccctatcactaccaccagaacatggagtccgaggcgcgctatctcggctactcgatcgaggacgcctgcctcgccaacgagatggtgccgtttgccgaacgcccgaatcgggcctggatgctcgccaaggtcggttgcggccgcatcttgccaaaatcgacctgcgtggacgctcaaaccctccctctctgcggccctcttcttgcgacctgcagtacaacgaatactttacgtcgtccgaaatgtcctgggacgtctctgcgttcccgcggatcggaaaagccgcctcagccgagctcaccggcggctttatcgaccggtccgacttcaagacgcccggccgcgtcgacggcgtcgtcaaccttggcagcaagaatcggaccgagtttgtgcgcgagatgagtctgagcaaggtcgtcatcggcctcggcaacccggtcatcagtccgacgtgagtttgctcttgtctacgatctagactcgcctcggattactgggcactgacacatctctccttgtcgataggccctacgagggtgcgtctccccattgccgcgcctttttgcgcttttcgaatgctgatctgccctccccccttctgttctgtcaccccagccctctgcctaggtacgtcttaaactgacgatggcgagtttacgaatctctgctgaccctttgtcatcgcatcaggcattccctttatcaacccgatcagggacctcgacaaggagaaccccgaggaccgcatgcgctggtggacgcagcacaacggcctgctcgagctcgacccgccctacgtctaccacatcgtacgtgcattttcgcctcctcgtctgcctcgtctgcgaggtagcgcatctgccgggctgaccgtccctgtcttgattttttcacagccggagcacgacgaagaggccctgacggccgccatcaagcaggcgatgcggtcgccgatcgagcggatggtcctccctcgcatgcgcaaggccgccgtccaggagcgcgttgagaaatgggtcgacggcgtcgactggtggcggaaatggcaggcgacgagcggcggcagctggggcgaccttgtcggccaggggccggtcgagggcgccaattagagatcggccggctctccctcacaccgtttcttttcaccatctcttagagctaccccaagcattcctctcgcgtcttctatcccatcctttcttctctttcatctccggagcatcattatcatgatattgtcggccgcctccctcgccttgctctttcggtcggctgcgcggattcagagcgatcgaccgaggcatgacgcgggcgagcggaggtcgtgcgccgggctgaaaatggaggcgatctcgctctccctccgaagccatctcaccatcacctctgctcctaccacctcaccaaaacctacacacaacacactctcaacttcaattatgtctgcccagtccgctacctcgaccgagaagaaggaggcttccgacatctccaccgcgtccggcgccaagggttcgtcgcgtcgccctccctctatctcctgctcgatctcgcccgggcgacgacgcccgaccctcgccccttcgcttctttagcctgactgaggccgaacgtgtccgaccgccccgaatttggtagctgaccaagccttctgtcgtcttttctgtatttcttcttcaggcctcgaggccaccggaggtgcgcccttttgctgccgcccatcatgcctcgtgcaggccgatcgaatcgctcatggctgaccttgatcttcctctctggcttttgcaggtgtcgagggagcgctcgccaaggagcgtgaggctcgcggtgccgtcaaggagggcgagtcaggtacgtccatctttccttcgcacccgagcgcctcgtccgcatgcagttgactgacccatcttgctttcgtcctcccagcccacgctcaggactctgagggccctggctccggccacaaggccgccaactgagcggcactcttcttgagcccgcctagcctctagtcgggcgtctgcctcgctcctctcgggtggtctctggcggcgcgcccagcccgccggtcgacgtcgcacgctgtatcgatttgctgcttccgctgtaccccttccgttcgtctgcaaagtcgtctttagtacgagccaggtgccgagtggccgacttggccggaggaagagcaagcgacgacccggtcggaagcatgctgtgccttgctcgactccgcagcgggtgagagtgacagacggcggcgtggcgtgaaggccggctccgctcccgagctgggctgtccctcgccaccgacagccaacttcccatcacctctattttatccatccccgcatgctaagtcgttccagtaccagccgtgtcgcttcgggctcctctcaggccgagggcggccgcggcctcttctccaaggttaagcaaggaaaggcctttgcttcccgctccctccttccgcgcaacgctcccatagcctgtcgctccaccctcgcccgctcgcgaccagactcgctgacagcccttgacatcccttctctaggcattgcccacacctctatcgtgcgtctcgaggcgagagaacggcgtcagtttgagctgagggctgactggccggctcctttgcctcccctcccagaccggcgccttcggcaacaaggacctgcgtgagctccagacgctcatcaccgaggagaagacgctgctccagacttcgggccggaccggatcggccttctccttgacatcgactgcactcaacgcctggggcgcctcagagggccccgacctggccgacgtcggccagcgggcgagcgagatgctcgccctcgtcgcgagcgcattcgagacgttcagcaaccgacagactgacatccggagcctactcaaggctgtccgaacggccgaggaggagctcgacgagctcaagaagcgccgccgggcggtcggcagccggagcgagagcgaggagaagaagctcgtcaagatgagctccgaggtgagttgcatccggcccgcatcactcatgcccgagagccgccctgacgcgtctctgcagaacaagaacctgccgtcgcagaccgagctactccagaatctgcgcaacgagatgcgcgaggtcagttgctctcagaccgtgtaagcggaagctcatggttgatgcgctaacgctccctctctgcccgcagcttgacaccgagatcatgaactcaggtacgagctcgttccgcctttcagcttgcgcaggactggcggctgatccattgggcgtgtgcttccttccagaggctcacctctccgaccacaagcgtgtcgctctcaagggtgctctctcgctcaagtttggcggcctgctcgaactcgccgaaaaggcgacgatcgtcggtgagcttggcaagcttctcatcgaggagatccctctcgagacgaccccgcctggctacggccggggaccttaccacggtgcgtgcctttcgccctcagaggcgtcaagcgcagcactcaactgaccgccttcctctgctgcgcaggccacgagaagacggcccgactcgttgaggaggcaagcaagtgcgtctccgaggtcaacttcgtcccgccccgggttcacctcctgccgccctcgcagtcggccatcgccccggcgagccaggcgccctacctgccctcgcctctcggtcacgagcaggactttgctagccagcaccagtcgtatgagcagttctcgggcagcgccccgtcaaacggcgctcacccggcgggtccaaacggcctgcacgacgacccgacgatgctgccgatgcgcttcgccgacgagaacggcccggcttcgccctctgctcagagcggttacgaccagccgcagcgggagatcggcatcggcgcgccacccatcagccccgctgccgcctaccgcaagagctatcagcttggtcacgaccagccttcgccgctcggtgcccacggagcagagactgctggctcgtcgtctcaggctccgcggctggacgcgtacggcaacgagctaccagctggcgaaggagagggctacgaccaggccgaagcgctcgacaacctcggcgcccctctcagccctggcctgcgcaactcgacaggtcggtctgcgccgcccgcgcaccggctgacgcttggcctcggaagcgacattggcaacggcggtctcatgaacgacgtgccgcagcggacgtcgtctcgcggcccgggtggcccttcgcttgcgcaaggcgtcctcgccgcggggcgcgaggcgagcggtctttctgaagccgctgcaccgcacgactcttatccgcacgagacgcactcgcccgaggactacggcgagacgtcgcttccctatgtgtctgagcctgcgccagagaagcgcctgtcggcagaagacgagctggcgatcccgccgccctcgtcagacggccacagcgtcctccagccgccgtcggcgccctttgctcaaggccaaatgatgtcgcctgcttcggagaagcaatccttcgtcgacgcgcccgacacccttccccgaccgggcagccggatcgacgcccccgagggtcaaggtcgtgagtcggtcgacctcgactactactctaatcgtgcgtctcacctttgcgtcctctgcaataggatgaatgctgacccaggcgctccactctccatccagattacgacgggcccccggcgccatatcagtcgccgctcccgcggccgccgcagatcatcgagccttcgctgccggcccagccgccagcgcttctctcgcagcagtcgtactcgtctccgatcaccgtctcgaccgggccctcaccggctgagcccaacatgccgcgaggcgaggctgagctcgcttcggccgcggccaagcgcgaggtcgagcgcgagatggattcgctcgcgtactcggcctcgccaatcggtcaccagccgccggtctcgccgctcgagtacgccccgcgcgagggcgagttgggggcgcgcaagatcaacgctggcgccttcttcaagcgcaacggcgccggtggagccggcagccggtccaactctgcgtcctttgccccgcctgcgctggcgcatgaccagggcgacggcggcgtcagcgaagacgacgaggggaacggcacccggccgcttcgcatcggccgcaaccggccgcacgacgcattcgaggtcggcagcccaccgaaggacgtcgccccgccgtacaacggctgaacacctcccgctcttattctcggaactgtaactcgccctgcccgcctcacacacgtgtcctatccgatgagctctccttgcctctatgagactgctggtcgggcagggccgcagcgggattgcgtcagcagtcatgcgtatcaagacggcggtggcggcgctctggctccgggtccttccgttgccggttttggtagcctgcgaggacgaacatcagcgtctgatcagaccgaaaagggagcagcaggagggacgcactcgacgacgaatgtcctcgggaaccagcccgtccggccgtcgcgcgtcctcccgcgccaccagtcgccctcgacgccgccctcccgctggagcttgtcgaggacggcaacaatctcgccctcggccagaccaagctcgagcgcgtcctttggctcaaagcggtacattgcccgggcgaacgtcaggtcctcgggcgggacctcgtgcgacgctgggtcgcctgcgatgccctgagggggtaggttgcgcgcgagcgccgtgatgacgcgcgacattgcaaagggcaggccgatggcggtcaaaaggaagaagaggagcggcttgaccgatgctcgtgggccggctacgggctgacctgcacgctgtcggctctggggcgagacgatctgagcgagcgaggcatactcctcgccccagccgccgccagcgccgccaccgatggcccctgcctggcctcccgatgtcgagcgcttgccgccacgaacataggcaaggatctcgcgcccccagcggaggaccgagaaggcgccgaggatctgaccgaggaagagcttggccgagccgacctggtcgacgacgctcgcgagcgcgaagaaggacgagtgggtggccatgtaagtagactcgagcagctgggcgaccgagctgaccgagtggatgaccgactccatcaggtggaacgccggcgaggtcgactcggcgagcgtcgacgagaaggttgggcccatgccctcctggccaggcatgccgcccatgccgaagccaccatcgcccatcccgtagccgccgcccatgcctccgtagccaccgccatagccgccgtagcctccgccaccgtaagagccgtagccaccgccggctccgaagcgattgtaggaagacatgccgcccatgccgccgccaaagccaccgccgtaggccgacgagccgtaaccggtggcgccgtacggcgacgagtaggcactcgtcatcgctagggcattctgccgaccgtaggggactgcaagagatcgccggaggtcagctcgagctgcctgactgacggggccatgtgagaagggaccaaccgacggcgtcgcggctcgtgatctcggcggggcgagacggcacctccgggccgccgctcgctgccgcccctggtaaaggttcgctcgccgcaatctggttcgccgggttctcccagggcttgggaggggcctgcgccatcgcgaggacgtcgtcgagagagctgaggagcaggaggtgggtgtgaaagaggttgtgggcgaggaggaaggctgggccgggccgagcgaagcgctctctcggtcggctcgccgcgagccgagcgccggccgataagtactgcctcgccacttgcgacgcaacggcatcttacatctggtcaagacaaggcaaaggaaatgcatggaatcgcaacgcaaagaatggtcggccgcttcggcttggaaggatgaaaaatgaggctcgccggcccgagcctactgcgtcgcagggcctcgcgagccagagacaatgtcggtgccccagcgggccaagccctgacggtagtcgtcgagcttgttgccggtctgcgatagaaaacgtcgagtcgggagagtcagccttgactgtattcagctatgacacaaggcagctctcgcgcacccgctgtagctccgcctcgtagcgctcgatgccggcgcagatcgagttgaagttgcgctcggcgccttcggcgtagtcgaggatagactggttgagccggttgaattccagagcgaactctggagcagtaggaatcgaccggtcattcaggcccggctacggtcactttcaaggggaaaagcccaggacgacgtaccctcgccgcccgccttccacgcctcgatgtcgttgtacgcgacgttcgaccagcgcttgacctcctcgcagacgatctcggcccggctgccgtcgaggacgacgtcggcaatctggtcgagatatcgcgctcgctaagcccacgtcaaagtcaaacagaagaccggtcagtcgggctcctccgcaagtcgggcttcgcaatgtgatgcacctcggcctcgtcgtcgccgtcgcgcgagtcagccccgggcggcatctgagccgagcggccagagacccgcacagggggcggccggtcaggctggcttgggcgggcggcgtgaccgtgcgagttgcgtggcatcggcggcgtcgtctcgcgctcttcgtgctcgtccgagccgccgtcgccgtcatcgtcgtcgtcgtcctcctcaacctcctcgacttgaccgtgcgactcaacggtctccttgcgctggaagaagcggctccgggcgcccttgtcgcgggttaggccgacaaaagagccgtgcatgtcgttgccgccgctcttgtcacgtatctcgtctgcaaagccgggctgactcgacgcccggcgcaagagccaggcagcgcgcggcggcgggacgtcgacgacctcctcgatcgcgaccgtgtcgatgcgcgaggggccgccgtcaccgccatcgactgccgtcgctggccgaacgccgtcgacgctgatgagcgagacgcggacgcccgtcgacgccgctcggacgaggccggggccgttattgcgaggctgcgggtttggccgggcgtacggtgtgggacgctggagacggagagacgcatgtatgcgcacacgagaacgacgagaggcaacgagaggttcgaaggcaactcagcgcagagtcgttaggatgccagggacgcgatccatctgacctcgttgtgcggcgcagcatggccgctgacggtccggccgccgtcaaagcggttgttggcccgcgtcctaatcgcaggcggcgcgcccgatccttcggcaacgcccagcgtctgccaaagcacggcaagagaggcgagtccatcaggcgagaagcagaagggggctgtatgcgcgacgcaccaggtttagggccgacggccgcttcggctgcggtaccttgaattgggcgtcactcggtccgacgaacggctggcgcatgcctcggccgccgggttgagcgccagacgtgtgaccggcgctgccggtcagcctgctctgtgcagcagccatctggcggcctcgagcgagcccgtctgctgcggccgcagagggctgcgcggtcgagcaggcgacggcggctgccttgcggccgaggttgcttgcgagcgcgggcccacgtttggagcggggtggcgaagagaaggacgacatcgagagttgctgtgcgggggggaaaagcggaggtaatggagactgagggtcgtgatcgaaggagcgggtgatggtcggtgggagcggccgaagggcgtagtcgagcgggcggtcggtcgcgcttgggtcgcgcggcaggaggaccaggcgtcagcgaggtacttctgaagtagctgacaccgccttgcgacaagtctgagtactgtgagccgttgatgggacatcgatagaagaagaggataagtagtgcgatcaggaagacaaaaaagggggggggggcttggcgacgcgagccgtgaacgcgccgggacaacagggcagacagagaaacgaaggtggattggttcaaaagagtgtggctgaccgaaagggtcgtaggagtctgatcagaggtttggggggtgtcccgcaggacttagaggaagaagccgacgagggcgaagaggccgagggcaccgccggccgtcataaccttctcggcaccgctgccggggatggccgactggctagcaccggcggccgaggccgggaccgacgacgagcgaaccgacgacgagaggcgcgaggccgagcccgaagccgagcccgaggcgcgggcggaggcggacgaggcggcggccgaggcggccgaggtgacggccgagccgacgacgttggtcgaggcggcggcagcggtggagatggcggcgccggtctcggcgacaccctcggcggtcgaggcgagcgacggggcgacgtactggtcttggccggtcggcgaggggatggcctgggcctgggtgggggccgtgtagttgttggccatgcacgagtcggcgagcgtctggtaatcggagacgagcgtgacgcccgtgttgccctggtcgccgttgcaggtggcacagttgaggacgttctggaggtagtcgtcgtcgcactggcaggcaaggtccgaggggtcgcagggcgagaagtcgcagctgaaggcgcaggcctgaaagaagaagggattgggagaggaggttcagttgacaaggtcggtcagtcaagcaagaaggacaagacgcaccttaatggcggcggggcagctggtgctggcctcggtgaggacgggacccaggtgcgtcctcgtcttccttttactcaacgtctttgcctctcgttgatcaatttgcgctctgttacagagctcgtcctcgactttgatccgctgcactcgaccgacctcgcgagcgacctgggtcgaatctcgtcgtcgtcgtcggcggaggggggtcgtgagcggttgtgcctctcgccagacggccggcagacgtcgcctcgctctcttgcaaccgtagaaaccggcctcgtcaattaggtcgcatggcgccctcttccctttggcccgacgcgtcagaccgaccgcctcaaccccgcccagcacggcaccgctcgaccttgcacagaccgctgaggagcccagcctcggcccggctcaaagccgctttcgcgcaacctgcctttcgctgcccttaatcagggccctcctgcacgctctccaacatccagcatcgggcgacgatgaagacgttgtccttgacgggcagcaggcaggggcacccgatgcaacaagcgacgagctcaagccccgggagcgcacaacggcgaaaggacgggcctttgagcgcgcctccagcccgtcagacgagcatctatgcacctaattctgtttcccgccctccttcttcctgcccggggggggggggcaagcctcttctcctgcctggctgagcgagactcgccttgcgtccccgagccgtcgccaatcgagaagccattagggcgtcactgggtgcacgagccccgttttttgtcaacctagtctcgtagacatgcgatagtcagcgagcttgcaaacgacgagatggtgtgcagatggcccgcgggcgagatatttgtgagggtcgatctagcgaggcaggcggatggcggacggcctcctgcgcgaaaggggctctcggacaaagtgcagatgcgagtcgctcggccccccgcggccaggcccgtcttccctctcgcccctcgctcccatcgctcaacgacacgacgacacgatgggcctctttgacctctttggctgctgcggcgcacgaacaaagacagacgtcggtcccttttcccttcccttctcgctcgcccacaaagactgtgactgacgcgcatgcacccctcgctcgctcgcaggccgagtcgtcccctctcctccgcccgaccgccgccgagccctcgcaagccgacgcccactcgctgtccgtccccttccctctctctccaccctcaccacctgccacgccgactgacccacctcccgcccgcctgcccaacaggcgcccgacgacgcccgagcccgagccggaccgctcgcagccgaccgccgaggagctcgcgctctacgcccagacgctccggcgcgcagagtcgtccgtccccccttcctcgctcgcttgtttgctgttcttggcctggctgacctgccccgcctcgcccgttcgaccggcctcctcctaggaaactcacgtcgctcggccaaccagttccagacgggcccgacgcctccccgcttcctgcaagctcgaccctgctccccgctgaagacgcctacgacgagcccgaccgagccggtcggcgctcacccagggaagcgatggcggccgctgctagcgcgccgcgattgcctggctcgccttcagcgccggcggcgggggggaagaagaaggccggcgggaagaagggcaagaaggcgttcaaggccgaggcggggtggtaggaccgctggtggggcctgccttgcccatgcgcttgtgcatctcgcttgctcgacccacctgggcggcggaagacgcacgtacgccgccagttggtgcttaggcgcgggccgcacgtcacaccccagccgacgagtccggatcgctttgggaagcctcgcgcgcggcgaaaggggctgatcgacccgaccgaccgaccggcggttccggccagctctcaggattgctcgtcggccgggtggcccggcgtgggacggacgctcggcgcctggagggcggtcggtcggcgctcgctccagcccttcttgagcctgctgaccgcaggaacgcaacggacgcatgctgtcggtcggtcggtcggccggtcggccggtcgcgggttctcgctacgccaccccccttcgcttcgcttcgggccgaccttaccccagcccccctttcgcacttctgctcgactcgttcgcgtttgctctgctcagcacgggatgccatggctctgctactgcctctgctcctcttctgctcctctgctgagaaaactagactcaaggcgcgcagacaggccagaagacgatcccttgctttgaaaggactggaaagacggctgtcgcgacgtgcgtcgactgctcaacggcccctccaaaaacgctcgacgagcgcgtgatcatctgcatcccacccgctcgtcagctcacggcgccggcctgaccggcccgccgtaccacgcgctcgccatcggcctgaacgcgcgcacctcgccgctgacgaggtcgccgagggtgaactcgcccggccgagttcgcggctcgccgccgacgtttgcctggagaacgatgaccgggtcggcggcccggccggaccagtcggcgacgacgacggccgtatggcccgtcgttgggttgccggccgtcgaggtcgtcgtcgagccgtccgagaagaagctcttgaacgttgcgtggacgaattggaggatgtcgccgcgccggatgcgccgctcgggaccccagttgacgacgccgtcgacgttgacgttgacgacctcgccaaagctgatgccgattgcctcggccagcccagcggaagggtcaccgccgtgctcggagatgagagaggccgagactgccttgagcgcgtggtcggcgaggtcccagcactcgcctcgaccgacgacggacccctcgcggctctctgcccaggcagcaacccgctcgccgtactgctcggccgcggtttcgagctcggcgaccgtcctcggccggggtggtgccgtctgctgctgggtgacgcgcggcgcagacggagcgacgcccgcgccccagccgatgcggacgaacgaacgcgagcggtcgccgtggaggatgccgagcttgagctcgctcggccctcgaccatcaccactgaactgcccgccagcagcaagcgtcgcgtgcggcagggagaggagcgagtcgggcaacgccagcggctggcggctgaaccacgccgagccgaggtcgagctcggctgcgctcagctcgcgcgcctgcggcagaggcaccgtcagcgtaaaggtcagcggcggcggcgtcgctgggcgaggcggcgctttgggcattgctgttggcgggccgaggccgggctgcctgcgaggtggtggcggagggcggtcggtgctggccggttcgggcgggcgagaagctggcggtgcgacggccggtggcggaggccgcttggtcggtatcggcggtggtttgcgaagcgcgccagcggcgacgacgctcgtcgtcggcggctgggaggtgccggttgactgcacaggctctgcaatatctgtcgaggaggccgcctgactgctaggccgacgcgagggacccctcggcggcagtcgagggggcaagctcggcactgcagcacctccctcgctgatgccagggcctgggttcttgtgcgacagcctcatcgagccgacgccgggtggcgctgtggcgccgcttgcaggccgttgctgtcctggccgtgcgagtgatggcccttggccagtcgctgtcctggccgacgcaccagttggagtctgtccggcaggtgcggctccggccaggccacggccgttcagcgcagccatgcgatccttaagcgagctgtagatcggctcaggaacgtcctccctcgccgacgacacacgagccgtggcttgccggtcatcggccgcaaccttctcggcggtggcctgtagcgacgtttgcgcgtcgggcgctcgagcgggtgatcctgagccaagccgagagttaggcgccgtcttgtcgctcgttgacggccgcgtcgcgagctggatcggaggtggcggcggtgcgagcggctcttcctgagtcgacaagggaatggtcagcttaggccctggcaaacggttcgctgcggaaacagggctggccgcaccacatcggcctggtcatcgagcaggtcaaagtaggccatgggcgcattaccctctgtccccccggcatcggccgacttgcggatcctccaccactgcctatgatcgcgggtcgacagctcagagtcagcaaaggccaagccagggcgcgaggagggtgcaaacgaggaggcgcacccggcgacgacgacctcgacgacctcgacaatctcgcccttgcggacggcgaggtcagcctcgtagagcgccttgtaggagaactttgctcgcgcccgacgaccgaccgaggcgtccatggctgtgaatcagcgcagaacgagtggtcgttggacgtcgccgttggccttgctgcccatctgctgctctccctccgacgtcgagggcggccgcgcagtcgcctcgcgcgatcggtcgaccgtcgcgtccctttggccgctcgatgccgctgcgagaccgacattcttgtagcacgatgagcgaggagttcttctccctcctcatcctccacctcctgcataagttccaaccgaaaacaagggttaaaggcgagtgactcccccttcgggtccgagccggacgtacctcaaagtgcatctgcaaacgaagggccgcacgcgcgcgcgcccacacactcgacgcgcctcggtggcctcttgcgccggccaacgaccatctcgcccgtcacccatcgctcaccaatccgtgcgtaggccctcgcagaccttgaggagaaccgacgctgactcgtctcctatgctcgggtgaggtagatccagcatgtttgcctccctcatctttggttagtccctcgttacctcctcttgcgacgcttgaccccctctccaccgcctgtcgagctcgcctggttagacgttcctggtcgagctgacgcccatcctcatctcctcttcctcctctcgcgacgtgcttcggcggtctcgtctcgtgctcggtctcgcaccgccttgtctcgctgatgtcaacgcgtcgacgctggttgcccgtcgcactctcctcctcctccctgtgatcctcgccgccctcccctcggctcgacgacaggtgcgcccaaggccaaggctgaggccgtcagcaaggtcgccgccgcctcgaaagccgtgcccaagtcggcgcccaaggtagtccgggccgggctcacccctcggcaggagcggctcgcgctcgagaagcgcgaccgtgactacgccagtacgtcgcctctcgccggcatccctctgaggtcccctctctagccagcgccatgtgcgccgaggttgaaggcctctttctacccctcttccgaacggcatccagacgacctccttgctcaggtcccgaagaagccggtcaactctggctataagctcttcctgcaggaggtcgatctcaagggcgacgtcagcaccttgggcaagcaggcctcgcagaagtggggcacgctgagcgatgctcagaagaaggtcggtacggcgtccgccccgctgtcgagcctgccctcagaatccacccctgacgccaatccctgggccgcttgcgagccgaccagacgtactcggaccgccagatcaagctccaggatcggtacttcaaggcactcgccgccttcaaggagactctgacgcccaaaaagcgcaacgttctcatcgagcgcggcatcgagctcccgcacgcccgcctaccgtcgtgtacgtcggcagggcgcttgtggccggttcttgcgcacgtgccgccaggactgacaccttcgtgcttcctgactgtttgatccgcttcgacagccgagcggggcaagcggcctctgaccgagtacatcaggtttgtccaggccttccttcaggagcacaagctcgagcccggcgtcaagagctcgcgagagcgtcagcaggagctcatcagggatgccgccgccgcctaccgcgcccagaagtagggcgccccagaccgcgtcgactcgtcgccctcgcctccgtgcccgtcactcgatctccggcctttcaagctcccctccttgcgtctctcacctccgcggcgagaatgtttctcctttttgccacgcttttgctcgccttcttcgactcttcatgctgcttgcccgagatgcgtcccgctcaattctgagatcatacggagaggtgacgcgagcgcaggtccatctcatcgccgtcagaagaaggcgtcgagccgcgtgagctgctggtagacctcctggctcatccgataacggagcatgcccgcaaagatggtcagcgagcgggccatcttgcggtactcagccatcttctgcagagggtgtacggcacaagaagggggtcagcggggttgccaggcttgccagagtgcgctcagcagcatcggcatgcaaggcacgcacgctctgccgggcctcgccgccgtatgagctctccttcagcgcctggtgaagcttgaagaggcagttcatcgtgacgatgaggatgtcggagaagttgtgggcgatcggctcgtcgaggtcgcggaagtcgtcggcgcggcgattgatggacgcaatgtcggtcgacagcggcaacagcgacgtcgactcgatcgcctggacaggcgggagaggcgacggtcagtagagggttcgaggagccggcagcgcgcgacctcctctgatacggacctcgagggcttgctcgagccggccggcctcgtagagtgcaaaggcctccttgaagcggaggaggacgaggcacgtctcgcggttacgttcgctgacccggccccacttgctggcgtcaccctggtagtgatcgaggatgccctgcgtcaaggcgccaatgttttgctcgccgccgaacgcggcactgcgggtctcgctgccggcggtggcggtcgcgtccgaaggcgtcgatgccgacggctgggcaagagacgagccgacggcccggttgaggacggcgatgaccgtgtcgtaatcctcggcgaggttgtagaggatgatggcgtcggtcagcttctgctgggtcgacgaccgtgcggcggcagccttgacgatcgtcaacagataggccttctcgtcggcaatgtgcgcgagctggatgtcgcgctcgatcgctccaggctgtggccagaccaagacagttctgatcagcctcgtcgccccgatgtctgggcccggaggagcacgaaggacgtacaatcttcgaaccgtcgacctttatgtcgccgagaagctcggcgtagctgccgctgtccatcacgagctcgcgaatcgcgtcgtggcagagctcgacctgttctttgccgaccggcgccggcgcgtcggccgagagacagacgaggtagatgtactggagcgcggtgagcgggtccgatcggccgatctgcttgacgtagcgctggatcagacgggcaaagttgagagccgacgtctcaaagttggtcaagggcgagattgccgaggtgactgccgacgtaaggtcagacaggtcgagacgcgtgatcagccgttgcgctcgtcacgccattctcgctgtaaaagagcacgaacggatctgaacgtccgagacatcggccttggcggggacgcgtaggaggccgtagtaagcgagtccaatcgcgtactggagcgcgtcgacctggtgttgctgcttcgagtataggaaggcgatggcctgcagggtggtcatgaagagggcccaaagtcagcctcgtcgccctacacatgcatcacccaaagacacgcaccttctcgaactcgcccgcgaagaggaggacctggaaccaaaagacgggccgctcgcctcgcggatcaaagtgacgctcgccaaacttgttgacaaggcgggccatgtcgcgcaggccgtacttctcgccgccgccgccaccttcggagctctcggcctcgcccgtagcgtcctcccggacaaaggcgagctggaaccagagccaatcctcggtcgtccgggcgacgccgacattcttgcgtacgtcaatgcggccgatgaggcggtaaagcgcctgcttgtatggatcgcccggctgccccgaaggcagcgaggcgtggcgaatgcggaggttgtactcggtcatgagccggtcctgctggatgcgcgtgagccggcggtcgccctcgagccagcccttgaggaagccgacaaagaagcgctcgcccgagcgcgaaaaggcctcctcgttcgccatcgcgaggtcaagcgcctcgcgtggatggccggaccggaggaggtagtagagctcggcatagaggggacgggcgttgacgagctgtgcaagtgtgcatggatgagctgcaggtcagccgagacggtcaaaaggtctctggaaggcgggtgacgccgcacctcgacgccctcgccccatcggccgtctttatagagtccgacgcgagcatagccgcgcacacggttgcctatgctcgggtcaccaccgagaccggcctggaccggattggcgctcacgcgcttgccgacatgggtccagtactgctcttcgaggaactccttgcctccactggcgatccgctgtcggacctcgcgcccgagctcgccctcccagccagaggtgtatcctgccgagtaggaacgctcgctgacgcccggctggccctcagcgacgatgcgggcgagcagggcaaaggactgggcgagaagcgggttggcaccctgcgtctgttgtgcgctcgcgtcggcgggcgcgagaagcgaagcgtatgccgagagcacgttgaacggccgagccgggacggccttgcgtgagaggttgagcttgctgactaatggcgagtacttgagcgcgcgatggtgcgaggcgagagtctggccgggccggagcgacgacgacgccgtcgactggccgaggccggaagccgagagcgaggcgccaaagtcggcccggctggccccgagtcgcacccgaccggaccgaccaaagccactctcagccaggctgctctcgccgtctgggccgagcccatcctggccggggctgcccgcaccaacctcctcgagaatggcccgcttgcgagcctcccaggcggccgagcgacgcgagtcaagcgtctcgttcgaagaagacgtcagtgccgcgtgtgccgacgagagcgaggtgagaatcagctgctcgcgcgtgtggcggaggtagccctggaggatcaggtgagaagtggatcagcaaggcaggttgttcctgtcgcaacgcaggcggcagtcagaggttggctcacgtcgacatcgccgtcgccaagcgggatgagaggttcaaaggtgccgccgagagcagccggcgctgtcgcgcgctgcacgcgtgcagtcaggtcggcgagattgaggccggcgtcggcgaggaggtgagccctgatagaaacgagcggttggtcaaggatcagctttcaggccaaaagcatgtggcttgtctgtcggtcgagcgccgacgtcacccaaaggtcagaggctgctgcaagacgcagcagactctgtccgcctggacgaggccggctgcaccgcgaggcggtcagagacgatctcggcataccatgaactcacgctcggccctcttctccgtcctcagcccagcgacccttcttgccgacgagacggcgcgactgctcttcgacctgctcgaggccgagatgaagcgccggcaggccggcgttggcggtgcccttgctcgagccggccctcgggcttgggtcgaacgcgcccggcgtcagagctttggactgggcgagcagtgaggcgagggtcgacattgctcgatgaccgtgtggaggattctgtgcagcaggcaaagagggcgttcggtccgagcaggagaaaaggaaggaggtgaggccgttgaccgtcgtcgtctggcgggcagccggccgtgcggcctcgaaacgcgtcgaccgggcgcaacttcggcgggcgcatcgtcgtcgatgcactttgggagggaagggtaagcccctccgaccgtcttctgtcgctcggaaggatagggcgacagggcactgacgacgacgacgacgagcgacaaactggttgctcggaaaagggccgcttgttcgcctggagctcaatcctggttcatcctgccgcggcgaccccgctgacgccacggctgacgagatcctctgcggcggtcgctttgcccgcccgcccgttggcactgagccaggcaaaaagagtggcgaccgcaagcaagagcaggaggagtctgtctgtccgtctccgtagacgcatgaaccgatctgctccggcggtgtcggcggcggcgggtagaggacgctgcgcaactggacggacgaccgcccgcccgcccgcctggctgagctgacggccccgagccacctctcagtcggcggtctgctcgccctcggctcctgccttgctgtccgccgtcgaggctgcctgtctgcctgcctgccgtgctggcgaactacaggccaaacggctgtcggcccagtggagtgacggcgcacgcaggtgatcagcatggccggcgcccggacagtcgtacgtcggtcggtcgatctttgctcggccctgcgatagatctcggcctgacgctcgccttctcatggactatcatgtctgcagtcggacgtcagacatgagaggaggccaacaatgaagcccctttaatgggcgcgcctgccttcgctcaggcgctcggccgtcccccctctctatccacgcgacccttcgcgcccctcttttggccgagctgcggacggtcgaaatcgacgagctgaacaggcggagcgaggagccgcctgccgtcgtccgcgcaaccatcacctgctccctcctacccttcgaccgtccatcccccccttctccgccagcctctgccttcgcccatgctcgcctcctcgttggccgtcggaccggcagcaatcaagatccggctctcgttcttacccgccctcggcctcgccgccggcggccagcgcgcgacccgtgcgtcctcctgtcctccctttcgcctgctgtcgctgcgaccgccgtccgcccttgccggcctaccttcttgttcactcggctgactgtctttgcggccggggtcgccacatcattgctgctgccaaagcggccaacaaggcggtcgaagcccaacagctctggtcgaccggtcagtctttctctcgagcaagctttgtccgcaccctcctactccgctcgtcttgctgaggctctcctatcgtcctgcttctttgcttgtgggtgcgctgcctgttccagcggacgtccttgcgcgcgcgcccgccccggcgacccggttcgcgtacagcaacttccaacgaggaaaaggaggtctgtcctggcaagatggccgatcggccctcgcaacgtctcgccggctgaccgtcggctcgacactttggccctccggacgtttgagaaggtggcccggctcgacaaggagcgttactaccgcgagcttaaggcgtttagggcgtccctcacccgcaagcagctcgaggtcttggccgaacacggcttcaagttcccgcgcctgcggcagtcgcacggtcagtcctcgagattcgatgcagaactgtcggccgccgctcatgccagtcttggtcacctctcttgcgtccgtttctccagctgctggctatgtcaagaaggcgcccaacgcctggttctgctccctcgccaagtacagggccgagcacccaacgcccgccggccttgtcggcgcagagcgcaaggcctttaacgagaagctcatacaggactgcgctgccgcctactacgacgtcaactgagcggctgccggcgacgctactgccgaggcggttaccaaaggccgccgccgacgtctccgctggctgcacctagcgcactcgacaatcactccttccgtcctctggcctaactctcgccacagtctttcctccagcttgctgctcttccgacacgacttctccagccacctgttgctttcccagccggggtctgagtcaaccaatccgcccagtcgctgcctctgcaggcgctcttctctcgctcggttcctcctgagcctgccacctcctgttctcctcgtctgctttgttccctcttgctacaacccgtccatctccacacccctttttgtaagtcgccgcggctggctgtcttgggttgctacaggtcacatctgtctgcaaggtagtctcgtctcccactcgtgctcgcacatcgacagaggcccagccgcgctgtctcaagctcgccaggcaacgcaaaattagcttaggcggtaaccaagactccagaggcctgctgcgacggtgaaacatgattagacatcctcttcgctctgcctgacgggcagatagccgcgacccccaccagccgcgccgttagccccaccaccgccggcgaccctgaaggagggcagcgacatcttgaacggctgagaccttagcgagaagatgcgaacggggggagtggtcagcagctagaagccataaaggagacaggaggagagcaagacggacgatgcagcccagccctctgacggaatgtcgtgcagcgtccgatagtcgacgcccaaaccgccgcccatcgtccaaaaatcgaagcagttctgcgagcgagccacgccgttgtcagcgcttcgtgcgaagagagagccgagcaatgtcgaggcataccgagatgacgccctgatcgaaaggattggcgtccttgctggcgagccggaggccatgcgcagctttgccgcgcgtgaagcgatcgaggccgaggatctggaggaggaacgcgaagcggcctccaggcccgggccgatgactgtgtgcatgaccgtgactagacagcgagccagtcgctgagctggtcgcaggtggcggcggcggagcgacaacgccgtcctcgaggtcgtttgggtcgagcgcggtctccccgagcgcgccggcccccatgccacccgatccagaggcggctgcgtggctctgcatcgccgcgagagcgccgctttggtcgcgaaggctggcgccgcctcggccgcccatgaagccatagcggccgaggtttgacacctcgagcgtcgtcatctgccgacagacctgccagacctggctggcaagcaggatgaccgtccaagtaagctgtaggccggcccagagcgtcacgaggaacagatgggtgtcatggccagaggccgtgcagagcgacgctggtaggacgcaaggggcgccggtctcgggcgtccaggtcggagcattctcgcggaagtctgcgggacggccaagcgtcgaggtcaactttgcgcaaacggcccacttgataggtgcgagacgtacaatgaaaggacaggacaacgaaggacgcgatgccggtcaccagggtcgcgacaaagacgagaaactcgcggtggttgccggcgccgacggcgttccagacccagggacagtagctgccggggcagtcggaccaacgttagtgcgagaggcttcgatgagggcaagagacggcacacactggtcgaaacgggcgacgcaacggtcagtgatgcgacagtgtttggagcgcagcggcttcttgacctgtagaaagcgatcacgagcgtcaggtgactggtcaaagcggctgagccggcacgacgcaccatgtcaacaatgtcaaacgtcatgccgttgaatttgccctggctgatcagctcctccatcgtctaagaggaccaagagccagagtttggtcttcgtcagtcagggcccatcagggccggatcggactaagaaaccggcaggatgcacatccttgacctctgcgtctccggacggaagcgggacaaagccgggatcgagcgtgatggaccggtagaaggcggccgagcacgatgcacaggcgacgaagaagactaggttgagtatcgagtgccctggcgtgtctgccggaatgcagaaagacgtgcggtcagcaagagcgtgacaggcgaatgctgcgggagcggcgacgcacggacgacgcgagagaaccagcactgggcgacgtagaagatgctcatcgtgatgacgctcgcaaagtagggcgacttggcgaggccgtcgccggcgccgtcaaactcgagcacgacacgcgtgatgacctttggtggtagagtccatggtccaaggggatcgtcagtgcgacgggcggacgacacgggcgagaagacaaaacagacgtggtgcatgccgtaaaatagaccgagggccatgaacggccccgagtaccatggaaagatggtcaggacgcccgaaatcaggtagaaggtgacgatcgggagcgcaaaaatggcgatccgtcgcgtgcgctggtcacagaaagataggagcgtcagccgaatgacgggccgctgcaagacgcgccagacttagcgcacctcgtcaaatcgacggcccttgagtcggccatcggcccagcggccggcctcctcgagagcgcgttgaaacgcggcatcgctcttgagctcgcgcgccatgtcgcggcttgtcttgcctgcgtcgtcctttgcgtcgagatcggcgccggcctcgatcaatcgccgaagcgagactttgttgcccttgacgacagcccagtgaagcggtgtcaggcccgagccgtcgcgcatggcgaccgaggcgccatgccggagcagaaggtcgaccgagatggcgtcgccttcgcaaggagcgaacgagctctcgtcagcaggctgcgagcctcatctgctgtcggaccgtcgcgtcgacctcaccttgataggcagcccacatgagcgccgtatggccgtccgtgtccttggcgtcgaccgccaccggttgatgcagacagaagaggagcggcatgacctgcggggcatgcgacaagaagctttgagtgtcagtcgtcggtgcaggaggaaggctttcgcgattacatccgacgatgaggggcctccgcaagggagagcttgcgacgaaccatcgacgagtgcgtgacgagatggagggtgttgaacccctgcgagtcgcaaaggctcgggtcggctccgtagctgacgagcaagtgcattacgtaaaggtgaccgtttctggtagcatcgtaaggggtagggtcgaagagataaggacggcatgctgtgagcgccgaaattggacgcggcggaagcacagagactgaccgagcagcccattgaagggggctcgcgacgagatcgccgccgagcgcgtcgacgtcagcaccggcatcgaggaggtagcgacacgcgcctagctaagggagaaggtccgagaggcaaatcgtcagtccctagccaaagaatcggcgcggtcggccgctgagaggcgcggcggaagcccgaggcgaactggctggctgcgcctcgcctgcggcgttcggctcggcggcggccctggcatgttggaggcagcaaggacggagctcacctgagcgttgatgctgagcacaagcagcagtgaatggaccgcgtcgtatcagtaagagggtccagagcagcgtctccgacagatgggttccgacagacctggcccagtgcagcggcgtgacattctggtcgtcccggtcgtcgacggcggcctggccagccttaacgagcgcgtcgatggcggcgacgtcgcccctttgagcagccgaatggatggaaggctgctgcaggccgttggacgagcgaaggaggtcagtcggacgacgtgcgcgacccgagcgacgtgacggacctcgtcggaaggcgctgcggcggcgccggcctgcggtgatggtggtggcagggcagatgccgaggcggaggcgtcgacggccggctgagagggcgccgccttggacggcgcgccaagagggtgggcgaccggcatccggcggtcgagcagcagaggaggcgggcgaggcttgtgtcgggaatgcaggagtgagggtgcgagcgagcggccctgctgctgctgctgtgccgctggctccgtcgcagcagcagcgcgttggacttgtcgatcgcgtcgctccggctcccgccgccttcgcctgccctgctctcctactactctctctctctccaatcgaagctcgctgtccccaacgcctatccgagccatcagccgcgtcgacctgctgcagaggtcagtctgtcctctccgctcttccgctctcgggaccgttaccttgcgtctcgaggcaggcagctccggccgatgctgacgacgccgcacgtcccgatccgtctcatgccccgtcatcaggccctccgccaccgagcccactcttttctcctatccctgcctctctccgtccgcactctcatcgcaggccacaaagcatgctccccgcctctcgtctcggctcgcgcgccagccggcattcgtcggcatcgccgctggctctgcgtgcgcttcactcggccggcagcggcgcgcggctggcaaacgcctcgccctcatcgtcgtcgacgctcgtccggacgtcgtcgtcgccgctgctcgtccggtccggtaccgccctgtcgccgacattcttcacgccctcggcgacaatcttgctcggctcggccgccggccttcactcgtcggcatcgcttcagctcctgcgcgacccaccgccgccgggctcgcccgagccggccaagccctcgctctgggcacggtcgcccgtcctccgtatcctcacccggctcggcttctcgaccgcgcttgggctcattgtcttgaccggcgccgtcctcggtcacgacgccctcacttatggctcgcaccatgtcggcaaggtcgacgtccacccgctcgcgctcaagcctgagaagggagggccaaagaacctgccgatccttgcgcatgacatctctgagctcgaggacgccgaccagcgcaaggacaagccgcggctcgttatcgtcggtggcggctggggtgtgggtgtctttcgccatccgtctggttcgaagctggcaggagaaaactgactcgactgctgcgccaacagggcgtcggcctgctcaagacacttcacgacggcgactacaacgtcacagtcgtcgcgccgcagaattactcgctctttgtgcgtggcctttgattcagcccgattgcttgtctagacatcgttcggctgaccggtacgtcacgactaatgccgcgagcagacgccgctcctgccctcggcgaccgtcggcaccgttgaggtccgctcgctcgttgagcctctgcgacggacgctcgcccggctccgcggcggtttcatccaggccaaggcgatcgacctggagatggaggaccggctactcgagattgagaccccctcgggcgagcgcgtctacgtcccgtacgatcggctcgtcattgcctgcggctcgagctcaaacacgcatggcgtgcctggcctcgagcactgcttccagctcaagacgatcccggacgctcaggcgattcgtcggcggatcatcgacaaccttgagctcgcgagcctgccgacgacgacgcccgaggaacgcaagcggctgctctccttgtacgtctctgcctgtgcctggcttcggttttggctcaagaggtaaagctgtagagattgacctctgcattcgtttgatcacgtcttagcgtcgtctgcggtggcgggccgaccggcgtcgagtttgcggccgagctcgtcgacctcttcaacgaggacgcctttgcgtacttcccgaaattgctccggtcgcagctgtcggtctcgatcgtccagtcgcgcgaccacatcctcaacacctactcggagaagatcagcgagtacgccgaaaagcgctttgcgcgcgaggacatgcacattgttacgagtgcgtccgccggagcctcggctcctctggctgcattgcgctgctttcgctgacgcgcttttgaaatagacgcccgcgtccaaaaggtcagcgaggactcggtcaccgtctcgatcaaagaccccaagaagccagacgaggagccggtgatcgaggagcttccttcgggcttcacactctggtctaccggcatcgcgatgaacccgttcaccaagacggtcgtcgaaaagctgcccaaccagttccaccgcaaggcggtcgaggtcgaccagcatctgcgcgtccggggtgcgccgccaggcaccgtctacgccatcggcgacgcctcgaccgtacgttcaccaattgttcgctcggagcgacatatttccttcctgacgtgtgagctcgcccaccgcagatcgagacacggctcgtcaaccatctgctggagatctttgacgagtgcgacacggacaaggacaacaagatcaactttgccgagtgggagaagctcgccgggatcatgcgctccaagtttccgctcgccgaaaagcactttgtcaagatgtacgtcgcgccgccctccttgccggtcctgctttccttgggccgtcctgactcatggcgtgcctgcgctcgacctgtgcagcaaggagatctttgacacatacgacaccgaccaggatggcaacctcggtctcaacgagctcgccgacatgttcctccgcatctccaacaagatgacggccctgccgccgacggcccaggtcgccaaccagcagggcgtctacctcggcaaaaagtttaccgccctgacaaaggcgggcgtgctggcgccgtcgcccgtctcgtccgactacacgctccagtcggacgagagcctttacagccagtttacctacaagcatctcggctcgcttgcctcgctcggctcagcgggcgctgcattcgacctcgacggctacggctcgtttgccggcggcctcatcgccatgtacgcctggcggtccatctactggagtgagcagacgagcatgcgcacgcgtgcgatgctcatgatggactgggtcaagcgcggcattttcgggtacgtcacccaaaccccctgtcggcgcacaagccttcgctgaccgacttcgacatctgtttcctccggcagacgcgacatctcgcgcttctgaatcctacgtcccgcccgggttgccttagatacacgtctgccttgctcgccatcttctttccctccccccatttagacggccgtcacagcgcaatgtcgacctcccaacgcatttgaagctggcacgcatccgacacccccaaacgacgaccgctgcggtactgtctgctttgcgatgattacgaccctgtacctttgtctccgtcgtctccgtcgtcttccgcacgactacggctatgttccgttcacattcgcagtcaagacgtcccgctgcgcgccgcccgccgccgccggcgctgaggctcgccctctccgcccgcgacctctcgattgccatgctgccttctgccgtcaccctcaccgactatcactagctgcccgaaatccagtctgcaccctcaggcgcctcatttctgctttctgagcacctcttctgcgggcagtcgtcgccttcgtcttcgtcacctccggtcgccagctcctcggtcgacctcggcgcgccgcaagctcggccgcgagctcgcgcaacaccggcctcccttcgtcctaacgtagcttcccctttcgacgcgcctctctgctcgtcttgactcgtggcaatgatctgggttctgcggcgctctggtacgttccgcttcggcccttgccttcgaccgctgtgaggctccgctcgaccgcgaaaggccgcccgggcgaggcttgctcgtcgacgtgcccctttcgcccctcgccggctaaacctgccgtctctgcttcgttgctgcagccgctgtcggattggccacacccagaaagatcggccttccgatccgtcttccgtctttccgaccgcagcactccgggccgacgcagtcgccgtcgccgccgccgccgccgtttggggatcccgagtcgttcaaagaaaagctcgaagctcggcttgcccgtgcccgtgcccgtcagtgagaggccatcaatagaaggagggcttcttgcgtttcttgccgcacgcctgggctgacgccgccgccggatccctcccaggtcgctcgacaggtggcggacctccagcagatgagctccagagcggatatctgcctacctttgatccgttctccgtccgaaaaatctatcacactcctggagcctttcggacggcagaggccgagcgcgccctggagcgaaaggggtggctcgagaaggaatcaggtacgtgagcttgagcgccgtgggctggagcgtgttactgacccggcacccggctgaatgcccctctgacctctttctctcaccagcgttcctcgcggaagccttcgcacgtctgctaaagaggccgccaacgggctttaccctcttccgacgcgacgtcgggttcagggtgaacccaacgcttcgcccggagcagcgccttggggagctcgcgcaaagactctctcacgcctggggcgttcttccagaagtggagaaggaggtttggcgtctggttgctccccgccctccaggttggtctaaagctgaatggtcggcttcgttcgtctcgcaggcataccgtgagcgcagcagaaaggcttacgcagacgcgaacgaggacatgcgcgccctcaaggccagctacacggcgaccgagatatggtggctcagccgctacacgactcgtggctggtggcacagtccccgggcagttctcggcggtgttgtcgacgtcctggcccagaatgagccgacccgagaggaattgaagcagcgagctcttcctcgcgtgcggccgcctcgcgaggtcaggcttaaacagggcatgttaacggcaccctggcgagcattcgtgaaccgctggcgggcgagtcatcctcgaccggccgatgtcaagcacgaggcatggttcaagtcgacggtcaaagctgcctcaaccgcctggcgggcggaccgggcggcagagaaggccgccgccgacgccgcggtcgccgccgaggcagcggccgagcagcgcgtagttgacgcccgtgtggctgcccgacgagaggtcgaacgggtcgagctcgccaagatcagagtcaagcagggctcgatcctcgtcgacgtgcggacgaagagcgtactggccgattcgaagcaaggcccgcccgacgtcgagcggtcagcctgatcccacgacctccgagcggtgggggagggattggcagaccgaatgccgccgctggattcatgagctgtcgctcacctctctcggcgctcgtcaaagcctgaaatgcgtcggggctgctagctgatagcatggctgggcctctgtcagtaagcgagcaggcctggccacggtccccctgccccaagcgaacgtctgcggcgacgacaagaaaggcaaacaaaagggcatcgagacaaaagttcggcgctatggcgggatcgctcgtgcgcacgagaggtcggccggctcaagagagcgaggccgagcaagctcgaccaactactccttgtccgcttgtccgccgctgtcgcttccctcgccgcccttcccgctgtcggccgccacacgagcggcttcggccgtctcgtgcgccatataggcgagccggcaggccttgagccggtcggcaaagcaggtgacgccacagtgctcgggcaaagggtgctcggcgcggtacccgtcgtagaaggcctacttatggccggatccaatcgaggccgccatcttcctggcatccttggctgctggaggagcgcgacgtcctggagagaggtcgatcagcgctgctcgcgagcaagccagaaggctgagcacgacgcccgagggccgggacctcagtctaaacgggacagcagaggcgacttacggcgcagcggcggcttgacccgggggagctggatgtcttggttaaggaggatctggcgctgcttttcggtgagcctggctttgaaggctctgagtgcatcgtcgtatcgccgctcgctgtcccggaatcgcgcgaggtactcctttgagagaaggaggacgagttatcgtcgagcagtctaggtgtcaggaggccgagccagacacggagctggcagagagagacggacctcctgctgcttccgggagagcgcccgccactcgttcgaggtctcgccctcgcgcgacgaccaagtcggcgccgctgtgagctcggcgagaaaaaggccgtgagcgctcgtaggcggctgctttgggatctgcgcgagaagggcggctggagacgtcggccgagaggtgcgtcgagtgtcgtcagagtcagtcactcgccggtcgagacggcagaagaaaggaagccagtcgacgagaccgacctgtctgtgcctcaacggtcaacggggacttcttggcggcgactgcatcgagcgtccgtccgacagaccagccaggagggcagccggagggggcgaaaaggattgaggcatcagccgccgtcttggctctcagaagcaagcccggcggacgcagcagctcacgcagcagggactggacggagaaggcccgcaagccaggttgaaggagagccggggggttcgtcgccttcgaccggccagcgacggcgagcaaagggcggcggagactggagagcatcggcggaaggtcggtcagtcggtaggtggtcgaagaaggcagtgttagaagagagggaatgtcgccggcgtcggaggggcaagctgaaggcggccgcgcgggcgaaggcgactgcgtcaactaggcatgacacacgcccctccctttggaagaggcgtgcgacaaagtcgcggagcgcggcgtgattgtcatggaccaaagccatctcctgactttggcggccaataagttggccaccgagcatcatgagagcaattgaagggcaccgttggagagctggagatcttttctctacacaggactctgaacgcctcaatcaatgcggatgaacgcgaatatggtgagggccaaaagcaaggcttttaggcattcgcgctgcgccctcagccggagggcgtctggacctgtcgattcggaagctcatgacagaccatcaacgcaacttgagagctcaagaaaatgacagggctgaagctcagagcctaagcttatctatggtctatcttacgctgcctcgtgtagcttggctgccactatatcgggcgctaaagagggagcatggcaaccgcgcggcgcggcgacagttcgtcgcacgcctgcttcacttcgttcagcaggcgtgtgttacgcctagcgtcaactgcgcggtgctgctcgaccaagagacctcgctcgttgcaggcagcctcgtctcgatgccgcctgtctcctcctcccgacacctcagtcaatgaaggccgctgtcctggctcgaaagaattcatgtcaggctgctcatcttactcgtccaaagggaagtccaagaatggccggaggcgatgcagtagcggcagctgccggcgtgcctcgcgactcttgcacggcgacgcgagcgccgccgctcaggtcgacctgccgaccacgtcctttgtccgaggccatctcccacctttgactcgctcagccccccctgtagactcgggctagcacatccatgagctctctccctagagcaagatctctttccggcctttccgagcccgatccggcggagagcaacttactcgcactcacccgtcctttgttgagctcgccggcctcgaccgcactatcgccttgtcgaaggagaacagccgggcttgcaacctcctgcgccgcctctcttctggcccaccatgcgaccctctttacctgcccgtgcgcgcgtattcagcgctcgcctgctgctcatcgccgcacgagctcgaccggtcctgccgaaggcgttgccgatgcccttccctctccagcactcgcccctccaaggggcatctcccctctcgtcactccctcgaacatactggaggcatttcagccagctgcgctctgatgcagatgaagacgctgtcgcctcctcaaccgctcagtcgctcaactcgagcgcaacagaggctctccgggctcacgccctctcgtcaagcccacacggtgcgtgatctgccaacacaagttccatcgtcgcagaagactgacgtgatcagatttgggtgcctgaacctatccggtaggtctcaagagagaatagcagcacagccttgacgatcgactttcgcccaatcaggcgaccgggcccagaaccgtcaaagcaattcgcaaggcagcggcccaagtcgtcgcccgtcgtaaatggcaggccagcctgaaagggccagcagtcacctggcggacagccgctcgccgtgaacgcgtcaagacaaagatcgaccaggaattccaactcccggacgagcacagccccgagctgcgagacctgcaacgtgactcggaggagaatgcctcggctcttgagtctgacggcggagtccactggtacgggagactcaagcgcaataaaaaggtgacgctctgtcgccgacgcggtcgttggaagggatctcatcttcaatcaccttggaccactctttgagccctcagagaccatttccgtgatctcaagagatgtgcgaccagcaccgctcgacgccctttgcgagatccgaccagccggccgggccgagaaacgtacggccgccgggcccaaaaaagactgcctcgagcgcctcgaggaagttcggcatgccgtcgatgaagggtcggctgcagaagtcactgagcgccggcaagaggtgcgtccggatgtgcgcggctgatgggggcagaaggtcggcgtcgatgaggtcagttggccgccgagctgttggcgacgtctgtggcgcgggcttggccagtgccggtgccggcggccgacgggcgtgcatcgactgttgcctcgattctccgagtggaggggccaatggcgaggcggcgggcgataagggcggtggcaagctaggtcttagtcggcgccgttggagcgggacaagtgccgagccccgccagcctccttcttgatgccgccagatgagctcgaggatctggaaggacatctgcagcggcgagaagggcgcacgtccacgtcagctgtaggagggcgcaacgacggtcagagcaggacagaccggcagggtgatcgtcatcttacgcagatcttccagtcgaggcagtccagtatcgtcgtaagctgaccgcgccagccgttggaaggtcgtcagacgtccgatgatcgccggcggaaaatgggtctccataatgacgagcatcgcctcaaagggcgggagatgactgtaggccagcgtcgccgtgtgctcgaccggaggtgatgatgaagcgaacggtaccggagacggtggctgctggtgacgggcccgtgtcacgatgggcgtcgagcgcagggcggtccctcgagccggcggcccagcagatggcccgacgtccatgtcgacctcgagcatgtcggcctctgacggcctcacgccgaggccgtcgagaaagacgtgggggttggtcggcggtggtttacgggtagggagcgtcggcaaaccctgaaactcggcccgcgcctggaggttggtgtcttgcgtccagaggacgacgcgcgtgccctcaggcgagcgacggagcgtgtctagcgcagcggcgagtatgagaccgtcgttgtcctcgagctgccggtcgttccaggaaggcccttgcagagtcagcgacggtaaaaaggcacctccaaggcagagaagaagcgacgcacggcgtgctgcgacgccatgtcgagctcgtcgccaacgagcaggccgcgaccgatgccgtgctcgcgctccatccgcttgacgtcgacgagccaggcgacggcccgctgggcgaggttccctatcgtcggcgcgccctgacggtcggccggcgccgacgaggtcttgaggccgtcgagctcgcgcaggactgccgacgggacgaggaaggcgaagccggcagggctggcgccggaggccgagacgagcgcttgctggacggccttgaggagcgagaggtgcgagattaggatgttggagtcaaggcagagcatgacgaacgaccctttcaacgttagctaccggcaggcaagcaaagagggaaggggcgcaagttcagctcaaagggagactattcgggcggcctggacggagaggcgagccgcaccccttggccgcctccgccggctggtgtccagtcgcccgcctgccagccgagctgctcgagtcggacgctgttgtgcgcagtccgtagctgagtctcccagtcgatgtccatcccgagcgacgtctcgacgacgtcctcagccacgccgctgatcgacaggtgaacgggcccgctgccgtcgcagaagggcgagcgcggaaccgggtgcgagtccgcgtacgatggcatggcagggctagcgcaaatggtcgctggtccatacgagcagccccagggcgattagcgcggctcgtgtcgagataggaaggaggcccgagatagtcagaggtcgcgggtaagacggcggcgagcgtcgacgtgctggtcatgcagaggcgacgcgacggagttgctcgctgaccgccgatggtgaccttggtgtcctctgccggaccggctgtcgacctccctcgcctctgctaggtgagtgagagcagtgctggagtattgagctccttctctctctcttagcctgccgctcgtgcgttctgcgatggctgtcccggagggagcggcccgactgcctccatggtgcccccgcctcgtcgctgctgctgctgcgctgggtcgagcacgcgatgcggcgcagaaagcccctctcagccccgagcctcgtcctcagcacttcgacaccgacttgcccaccttcccgcctcctcctccctctccaaaccctcctccaggatgctcagccttcgctcggcagtcgcaccgctcgcccggagagctgtcgccggctactcgaccatggccgcccatcagagcgccgtcaacggcttcgtcggcgccgtcgggtacgtcgtccgcgacgctctctctccgccgagcgagctttcgaaggccggtctttgcgctctgtgagggaccgctggcctaaactctgtctccctcctgcacgtgtcatcgctccgatagcaacacgcctctcgtcagtccgccccgatggagttccttcaggctgcgggcgtgccggctgactgatccgcccatctttgcccctcccgcgcctgtgcccgtcccccagatccgactcaacaagctctccgagcagacgggctgcaacatcctcggcaaggccgagttccagaacccgggtggctccgtcaaggaccgggccgcgctctgggttgtcaagaacgccgaggagcagggtgcgtcggccggcccccgggaggggcgatgcagcgcgctgcgccgaccgtccagtggctgacgtgtgtgcctacgctgcaggcctcatcaagcccggcggaacgatcgtcgagggcaccgccggcaacactggcatcggcctcgcccacgtctgtcgggccaagggctaccgttgcgtcatctacatgccgtcaaaccaggtccgtccaggtcattcgtcgcccagtaaagggacgctagctgacctcggctgatgactccctccagagccaagagaagattgacctgctgaagatgctcggcgctgacgttcgcccggtccctggtgcgtccctggaaggagcgagcgagcgacaagtctcgccacggctgacgggctgctcattttgcccccctgcagccgtcgcgttcagcaacccggagaactacaaccaccaggctgcccggtatgcggcctcgatcgagaatgccgtctggacgaaccagtttgacaacgtcgccaaccggcaggcccacatcgagtcgaccggccccgagatctgggctcagaccggcggccagctcgacgcctttacgtgcgcgaccggcacgggtggcacgctcgccggcacaacgcgctacctcaaggacatcagcgggggcaaggtcaagtgcttcttggccgacccgcccgggtcggtcctgtttaagtacattgaggagaacaagctcgagcggacgggcgacggctcgatcaccgagggcattggccagggccgggtgaccgacaacctcaagcccgacattgcgctcctcgacggcgcggttcacatcccggacgccgagtcgatcgccatgatctaccggatcctcgacgaggagggcatctacctcggcgcgagctcggccctcaacgtcgtcgctgccgtcaaggtcgccgagaagctcggccagggcaagacggtcgtcacaatcctctgcgacggcgcttaccggtgcgtctcgacctcgcgcctgacaccacgctgcactgctgactcgccttgtcgccctcaacagctaccagacgcggctcttctccaagtcgtggctgacgtcaaagaacttaatgacggccgtgccggagcacctgagaaagtacgcggttctcgactgagggatccgatgaccactttctagtagacccgtctcgctcccgatgggaagccatctctatcatctggtctacaagaacgtctgcgtcgctgcccgccgcctcagacgcggtcgtagctcgcgccgccggccttgcgcaggcggacgacaatctcgtcctccttgagatcggcttccgtcgaggcgttgacctggatcgagaaggacgagaatatgcgcttgacgtcggcggcgtggaccgagacctgttgcgcagggcgagcagcaagagaagggggaggagagcgatgtcagtgccgatcgcgcagagtgtggaagtcagaggctgcagggagactcgcccttgcccggcgcatgatcttgaccctggcgtgccggcaagaatcaagtcagcgagagcgatgccaaatcagtcgaggcccggtgacgcctacgcactcctcgccaatccagacgatcaaggcaaacttctcccggaacgactcctcgtcgttggcgtatttgacccggacgtagctgcagcgatgaacggtgcgagacatgtcgtgcatgtcagctcgagcgcgcaatgctgcgtgacgcggtcgggcgcgggcgcgggacgcacgcgaacgaggcattgcccttgtcgaacttgggctgcaagcacggtcagcaatcgctaggtcagcctttgcggatcgtcttgtatctatagagccagcagagacgtacgatgagctcggcgaggccgccgctgccggtcgccgtgacggagagggtgttgcccttctcggctgaggtgcgggacgaacgccaaggcagcaggcggcgtgatcagctccaggtcgtccgcagtctctacagatctcttcagaagcggctcttggaatggtagtagctcagtaggagcttgtctagtgcctccaggagcttgacagaggtcgacagctgccgagagcaagctgctcgcctcgccgagaggtcgttagagatgacgtgaggctcgaggaagggactgacagtcgtagtcgatcaggacccagttggtctcggtctaaggtacagattacggtatgatcagctctctagcgagcatgaagaggtaggcaagctctggggcgtaccttgtcgttccggatctcctcgtaggctgagcgtgcgcgagtcggcgagagacggaggcgtcagcgaggccatacgtcgcaacctcattcgatagcctcttcgaccgagccgagtgcgaagtagacgactgaccctccttgatcttcaggtcgtcgacgttggccatgcttaggagtatctctctggaaagaagctgaagagaagcgcgagatggtgaacgtcggtggcgggccggcgtgcgggctcgaacgcagacaaggcccgccggcagcgacaggctagccacgccgacctcgccctcccctcgactcccctttccttcttgtcttgctcgatcgaggccgatgctgggatgcctgtcctgctgagcgcgcacatttgtcctgctctcgagatgaaggcgggtcagggcgactgacctggtcgcgccgcctgctcggacctctgaaacacgcgcctgcaaaggggagggcccgggcggcctgcccttgagcaggtgctcgacaggagggggcgggctctcccgctcgacacccaggacgacgctcgaccttccccgccactctcccgactctgcctttcctccatgtcgacgccctcgacgaccgatccgcgccgacgctcgcgagccggcccaccgccgccggtcaagcctccgcacctcaagcggctgagcttcccccggccagcctcgcaggccggctcggtcgcgtgctcgttcgactcggcccaccagacctcgaccgcctttcttgagagcgcctgggagagccggccggtctcgtcggcgagcaccatccgggaagacgacgccgggccgagccagtctccgagcccgagggcgagctgggacgacgtcgacggacaggaggcgtgggcgctctgggcgttcgaagggaccgagccgagcgaactgtacgttcgatcctccctctggtctgcttgcggctgctcggcatgagctccggagcagatgagaatgccgacctctcgccactgacttcttggacgcgtcgtgatgtccaaggtcgtcggtcgcgcagcatgcaccgatccgcgttttgtcgctcgagcacagcgacggctggtcgctcgtccgccttccgacgacgggtgagatcggtctgatgcctcgcttgtactttgctcactgctcgccgccgacgagcgacatgctcccgcgaacgaccgacatcgacgtcccgctcattcacccctcgccgtccgtccactcgcctgcggtcagccctccgtcggcatcacccattgcccctcagatgactggcgtcgagggcgcgctttccaagatggtgcgccagtcgctcttccacggccggacaatcaatcgcttctccagtttcgtcgtaggaggggcagaaacgtggattctggacggcgcgcctgagcaggatgccggcagcggcgatggcacctcgaggcccaagacgcattcgcgcctgaggtcgaccgactcggacctcagcgccagcgactaccgcgccgaggctcgggcgagaggcgtcagcgaggccgacttgcaccttatcgacgcacgtcctgttgccgcggcttgtcggctttcctccttgctgacgggctctctcctcccttcgcctgcagttcgggccgtcgtggaaggccaaaacgcccccgttcgatattgctgtccacagcccgcagaagcgcaagagcctcgtcggcttgtcggactacaccatctgtgcgtcgctttccgcccccggctttgggcttttacttcatctgacgttgatttgctacccgtctagacctcatcacctcagccttcccctctgacgaccctgccgaggaggccgtctccgagatcaccgtcgaggtgcgccttccggtggaacacgcacatgacgcccaaagctgactttattctctttccctctctcagcgccgcttttcgaactttgttacgctctcgcaacatctcaccaagaagttttctggcctggcccttccgcccctgccagagaagggcctgaccggccgctttgcggccgacttcgtcgagacacgccgaggcgacctcgagcgctggctgcggcggatcgcacgtcatccggtcattcggtactcggacgccctcgtcacttttctgggtgctgaggatgaagaggtgcgccaatctctttcgtagctgcgaccagggcaggcactgacgggctctttgctggcaggagtggattcggatgtgtccgacactggacgaggacgcgcacatgggtccgctcttctacgccaagtgggttctcagagcctgcctcaagttccttttcggcagcgtacgctgacctcgatgccccttttcagcatcttccacccctccttcaattttgacctcgaggatgtgcaggacgccgtcgaccgattcgagaaccacgtccttgctgccgacaagggcacgcaaggcctgcgtgagaccatctcaaagctgcgcgagtcgcagaaaggtgtgctatcaaagttgaagcgccggcattcgcttctggctgacgacgcgttgatcgtgttgcagagcacggcaacgtacgccgactctttgccctccacctcgtcgctctgatcagcgcgaggcaggtcggagagatcgcaaacgcagacggtagcaatttctcgcgcgacaacgacgaaggcggtggcggtgccgatcgtccagaccagaagggcctcgtcaacggggacggtgggtggtgctttcgggacgactgcgaaagtgagcccagtcattcgacccccagcgctcagagtgtgaagctgacgatcgacatttcagactgcttgaaattgacaaagtcgatacagactgccgctgagcgtctcgccgaggtggccgatctcgaggctcagcacgtacgccttggcacgatggcgctgggtgatctcgtcagctgatcgctgcgtctgctgcaggccgatgcgagcttgctcaagacccaagaggcgctcaaggatgtcgcgcatccctcgactctctacgcagtcagtttgatgatcgcaatcgtgcctcagcctaacgcctcgctgaccttgggtcttctcatagcccgtcatcgagactcatcggacgaccgtcgctcgctatgtcgatatgctggctgaggccgacgctccctcagacgacccacgcatctggatcgctgcgcccctcgaggctgcaggtcggtgcgagactgtcttgaacagcacgctagccgagatgaacgaataccatgacgcgaaggcggccgactttcgcgctctgacgggcagctacatcgacaccgaaatcgctcaccacgaggccgtcctcgccaatctcaaagccgctcgggctgcgtttgagccatcggcggacgccaatcatgggcaggacggactgcgaaggccgagcgcgctggaggacgaactcgcgaatccttcgcagggcatgaagaccgacctgcgtcagccatcagcacatgtgagccacttcctacgattcgtccgcccggccttgcgcttactctccgtcgacactcgcctctcttcgcgcagcctctcgactcgctcgttcggcccgtgacggccgcggcgaccgtcctgaacgactcggtctcgcgcgtctggagctcgcttccgacgagcggcggcaaccggctcagtcgttggctctggtgacgggcgcccttccctcgacacttcttaatccgtacaacatgttattcgagcgggcgcgttggacgcagagcgcatgctatgactgctggagaaacgcgagaagcttgtccttacccttggactggattagattgcgctgaaaggggagcagagtggcgtcagcgaccgcagcaatcttgctggtggcgcgagcagacttacgatggcgcgcatctgcgtctcctcatctatggaagcgagattggccgccagctcgagctcggcgctcgactgggcatgcccgttcgtcgtcggtggtggcggttcgacaatcatcgtcggcatgactgcgtcgccatacggcttctgcgcagcttctgcactcggcaccgctgcgacggcaacgacctcgtcggcctttggcggcgagccagagccatttgcgcgcgagagtcgaaggataatcttcttgccggttattacgtttggcagggcagtcggctcgaggcccggctgaaaggtaggagtgggaggcaacggtcaggacgacgcacgggcgcgtcgagatcaagatagcctcggacgcacagagagaatcgtcgcgtcgactagttgcgagaagctcacaggaaagtgcgatgctgcctgcggttcaagggagtcgctctgtcgtcagcgactgcgtcgggaccgcatcggatcagacggggtagacggaccaccggcacagtgggggtgccgccgttggctattgagttacccggctctgattgcagcgacgagagatcggaagaggaagcgaccgacgcgttgtccgactcgtcctcggactcggatccgagtgacgtgaggggcgagcctgaccgattactagcagcaaatgtccgagcagcgccagcggctccagaggtcttgaccaccttgaccgctcgcggccggccgaggaccttgctccagaagtcgacgatgatcgactgctcgggcacgcggtagcgcttgttggataggacgacgtcctcgtacgcgatgcgctcggcctctggtgcgggcaagatctcgacgtggccgttgttgtactcgcccggcccggcgacgtcgatgagcgacaggccctgctttggaattcgcgacttcggctgaagaggaagcgcaggcgacgggttggtcagcaatcaaagatcgtgtgcacagaccaggaccgcgacgcaccatgacgtgctcggcgtgattcgggcacatccacttgtgcgtcacgtgcggcacggccgtcattggcggatcgaggcagtcaaagtgccagtgcagggtgcagaagtcgcacgagatgattttgcgccagcgcgagacctcgacgccgatccggccgctcaagggtgcggcacggagctcggccgcgccctcgagcggtgccgccgagccgccgcacttgtagcagagaacgtcgagccccttggcgtccttgagccggtgcaggtcgcgctcctcagcgaagcccttgcggctaaatcaagacgaagtatggaacagaggtcagcggatggcgaccctagctgccaggtaggagcgagtgggcgcactcggccttcatcggacggagccggtctccgtcgacatacgcgccattcggggccacagcgactgaggccaaaaggggagagggggttagtgctacttggacggaaaggaagagcatgctctggccgcacctcctttgaagtacgccttgacctcgtttggcagctggaactgggcgggcgacgactcctcgagctgcgaaaggagctgaccaaatatcgtctgctggggttgcggttgaggaatgtgaccctgcgaggcgagtcagtcagctgctgagaggcgaggctggagcagcggcgcgcgcgcgctcacctgggtcatgtggcagtcgcggcagaaccagagactgtcctggtcgggcacgctgtcgttgtccatcggcgggtcgaggcacgtgaggtggaacgagtgagggcagccgtcgcagcagatgaagcggcctttgccctggcagacctgacagaagtcctcgttcgggatgaccttctggtcgtggcggcggcgtcaagaggctcatcagctcccccacccaggccagctcgacctcgaacagcatgaaaaaagacactcacgttgtcgccgccatggacgatggcctttcccttaccctttgggtcgccaggcgcgccttgtgaggctccgagcgcgagagacctgctccggccgtctggttttgacaggcgctcggccgccgcggctcctccatctgccgccgccgccgccccagtcgacgattcgcccagggccgcgagcgagggcacacgcttgccggtcggggccgcgtagaagtcgtactcgtcctccggtacgggagcataattcttcttgctgtgaggcgcgaacagggaggtaggggcgagcaagtgcgaggcagcgcgaccggcagagcagcggcgcgaggcaacagaaggtcacagcacgaggagggttgccagccagatgagaggaccagacagagaagcaatgggtcagctcttgcctctttatagcctggcgagaccggcctgatctgagcgagcgtgcctgtccgagtgtctcgacaggccgtcggacaaagctagggagagcacgcacccgttcttggcagctcgccgcgagcgctggtagcccccagcagacgcgggcgatgatacgtcggcccggtttcccgcacccgccgtgatgtcgtcctcgaccggcagcgctcgcttgagcggtcgagcgatgctggcgctcggcgcaagcggcacggcagtcagtgcggcgggcggcgcaaccgcgacaggcagtggcagctcggcagccggcggctcggccataaagacgtcgagcgccgtcgagggttgatctggttgaggtccgttcatggatggatgcttgaggagtctctccgtcgcaggtggacgtgagagcgagtagtgccggctgggaggagaggcaggcgtacggggcaggcggcggcgaggcgatgagtgggctctcgggtgaggtctctgtctggcagcgcaatccacttctgtagcgcaaaaccgaccggtcattagcacgcaagacgacacgggcatgaacgagaggtgcggacatgcgttgcgttctgaaggcttgaacgagaaatctccctggcaagaggaaacgaatgaggtcggagggaggaggctggctctcaagtggccttcggcggagcttctcgcgcgccgcgtcctgagctgccctctcgccgatactctcgtcccttcatcgatctcctatccttcaggaagcatggcgctctcagggacttagttctgctcaattcgggccctggtgcacgatctgccagcaaggcaccggctagcagaccgcctcagggtcgaggaccaggctcggctcggtcggcggcttcacagctgacccgaccttccgtccttgccagcggcggcaccgtcggaggagcaactgcaaaagtccgtatcggcaagctgcgctgcgctggcagaccgaacgagataggtcgattgtcttgcgcgaggagtagcaaggcaaggtgtcgtcgaccgcgacgtcccgcgccagcccctcgacccatcgaagggagcccgctcaacgcgatgggattagaggtctctcttctttgatacctagagagggagaagcgtgggatgaacagtcagtggtctgctctctttgacgacccggctcgaggcaagtggaggctcacagtttccggctcgccgctcagaaggcagggacgaggtactcgccgaacgtgcgagtcaggatgatggctccggcaaacagggcggtcgagacggcgatcctgcggcgagaggagaaagaaagcggtcagcatctgtcatccgaagcaagagagtcggctgacgcatgacgctgctgccggcagccctcgagagctgctcctcgcgcttttgccagccgtcccaatcggtgcaccacaaccgaccaccctccggcagatagcgatggcaagggacgcacttgatgtttccgggcgccttctcgggattggttatttcggaccgccagaacgaggcaaagacgttcgaggccggggcgtcggcgccgccgccgatgtagctgtcagaggggcgagggggcgtcagcgtcagcgtcgaacgccgcacgtcaagaggagaccagagacggaccgcttctcctgaggacgtccagacatgatagggtgtgaaaggggagggcttggggagagggcgaggagaaggaggaggtcgtggaggagggtcggcagctctcctgtctccctccctctccctctccgcccgcgcgccggccgaccttccgcctgcgcgggtgtgcgagcgggcggcggcagcgcggcggcgagcgaggcggcgggcaggcgcagtgcacactcctgccatccacatctctgcccctctcctggaacaccaggctctctcgtctgcgacccgagctcagctagcagaccgcctgcccatcctcgccatcgaaacagccgaacatctgcgaggcatcgaccggcgaccggcttggtcagacgttgtgcgtgtgccgcgcgccctccccccctcctcgaccagcgcgccatccctccgtcagccggctgacctcgagccgacgacaccttccgcagagttcagaggaagcgctcgaacgcctcgccgtccaatcttactccatggctgccgaatttaacaacggcgctggcgcccgaccgaccatctcgccggcggcctcgacgtcatcctcccaccgcctgccgcagttggccgcccgcccagggccacccgaccggccgggctcgcatcagtcggctgtctcggtctcgacgacgtcgagctcatcgaccggtggtgacggcgggagcagctcgagcgtcaaaaagctgcccaagtttttgctcaggagcaacagcaggagggatgacgccgacgctgccagtcaggctgccgggagcagcagcgcagggagtggtagagccgacagaggcggaggcagtggcaagctcctgggccggcgccggaggtcggacgccagcggtcgggacaagctgccgtcgacagtcgagggccacgccgaggatgacctcgacggcgccgactcggcttcgctcagcccgagcgtcgcgacaagcgcgtcccgctacgggcccggagcagggcgggatggccactcgcgccagtcgtcggcgtccttcatggacttcgagcccgaggaggttctgctctcatcggcagctccgagccatcgcagatcagtcggctcggtcgacgaccagatgggctcggtcccgcccaaacgcgtgagcagggtcaaaacgatccggaagaagacgtcaaagctcttttcgaccaaggaccgctcggcttcgaacggcagctcagcgagcggggcagccgtctccgtcagagatgcgcgggtctcgcctgctccttcgcagtcgccctcgcttgaggcacctccgtccgccttgcgccagcggtcgggctcgccctcatcgaccatttcgtcggatccagtgattgttgtcgagccgcctctgcgcggaatggcctcgcctccgcagagcctgcgcgggccgagcaaaggccagcagccacgcccgcgaccgggctcgacggccagcgtcgagtcggccggccctccgtcgacgaacggcttctatcagcagcccggccagcagaccggttctgccgtccgcatgcacgacatcgcaacggcgctcccaaatcgactcggcggctggctctccaactttctgccatcgcaccaacagctctcgtcttcgccgcccaacgcaatcgccagcagcagcagctcgagcggcgcgacgccgatcccactcagtttgcatgcgaactcgccgccacgagcctcgcagagtgggcagcagggcccacgctcgtttgcctcggccgctcgagacaagggcgccctctcgcgctactttctcgactccgacgcgaagaagcccgagcgcaatgcggagccgatctggctcatgggccggcagcatgacggctggcggccagaagagctcgacgagcaatcaccgtctctggccaacggtcttccacagcctccaacgtcggtcgcaagcggctcaccgcagcgcaagacgtcagcgagcgccctctccaactcgacctcgcccggccggttcacgaacctcttttccgggagttcactctccttgataggcaaccccggagccgaggactcgtcgccgcggagggatcgagggaggagggaagacgtgcgctggccggccgagtgtaagttcttgcttcccctaacggcgcgcttagcgcgcttttactcggtctgacgcctcgccgcctcttccagtctacgatgacttccggacctcggtctggtgcacgtaccgctcgcagtacgctgcttttgcagccctccctccggcgctactcgctccacctccgactgcgtacgactctgacggcctgccaaccgctgcgttcctcgaggcgagcaagcgacacatcgcagtcgagcctccaatccagcgcgcccagtcgggctgggcctggatcaagagcggcggtgggtccgacgaccgcagcctaacgaccgactcgggctggggctgcatgctccgaaccggccagacgctgctcgcaaacggcctgatccatcaccacttgggtcgaggtcagtagctcagttacgcccggctattatggtgcgattcctccgctaaccatcgtctccctcgtcgttactcaggctggcgtcggccggagggtccgccggcggccgacgcgtcaccacaggagatcctcgattacgcaacctacgtccgcatcctgtcgtggtttatggacgacccgctgccgttcgcgcccttctcggtccagcgcatggctctgattggcaagcagctcggcaaggaggtcggcgagtggttcgggccgagcacggctgcgggcgcgatccggacgctcgttggcgcctacccttacgccggggtcgccgtctcggtcgcctcggacagcgtcatcgtcaagtcggacgtctttgctgcctcggagcccgcctcgccgctgccagccgcaggtggttcgcttggcaagaagtcggccggctctgcgacgagcaagtcggcgacgtggggctcgcggccggtcatcgtgctcgtcggcatccgcctcggtctcgacggcgtcaatccaatctaccacgactcggtccgcgacctcttcactttccctcagtcgctcggcatcgccggcggccggccgtcgtcgtcctattactttttgggctaccagggcgactcgctcatctatctcgacccgcaccacacgcgaacggccgtcacgccaaaggccgtgccggcaagggacgagctgctcgctcgctccgcagcgggactgacgctcggtcaaccggccgacaccgccacgtcggagacggccgcgccggtcgaggcgcccccgtcgccactcccagcggaccccttcctaatagctgcagcgactgctccggcatcctcgtcaactccggcctatgccaggaccgtcgaaggacccacctcgacatccgcggctccggctccgggcgcctcgttgccagggcgagttgggttggaccttctcgccgagtggttttcgacggcttactcgccccaggcgctccagaccttccactgcgacaaggtccgcaagatgggcttcgggcagctcgatccgagcatgctgctcggcttcctctgcaagaatgaggccgactgggacgacttccgccgacgcgtctctaacgtaagtcttactttgcgtcacgccagtgcttgaccgcttcgagctgacgcgcgttcccgacagatgcctcacgccatcttctcgatcagcgatgaggcctcgagctgggacgacgacgacgacgtcggtctcgagagcttctcggagaccgacattgactcgaccagcggcgcagacgagcgcgagtcaccgagcggctccttgacgcgccggtcgagcgatgcggccctcgacgatgccgaaatcgacaccgagctcatcagcaaggacgaggccggcgatccgctcgtatcagcatcagctccggcccactcgcgcgagtcgtcctcgtcctcggttcccgtctcggtctcgacgcaggggacgccgcaacactctcacggcgcatcagtgtcctccggaagaggaccctcgactcccaccacggcccggccgcccaacgcccgggcgctcgggtccgaatttgagctgctcgacgagtgcgactggcgaggggctgacttggatgaccagcgcgacaacgacggcgccggaccggtcgcatctgagtcacccgtgcccaagaagcgactgccgcttatggccgccgaccgacctccagcctcgacaattgccttcccctcgctcaccctgcccgacggccaggcgagccagtgtgcctcgctcggtgcgcatcgcaagccgacgccgacgcaggcggctaggctgcgacggaaggccggccggcggtccatcagcgaggccacgacccggccgctggccgaggaggagggcggcggtggccacgacgacgatgacgacgaagacgactggcacgaccaattctaacgccctctctccatttctctctctatctgcctcggacgaaaaccctctcttgacgttgcagacgatctatgaccaccgcctcgctggctcccttttgttctcttgtctcgcgctcgatcgcttcccttcagcccggccggagtcgtcgctgccgagctccgtccaaccatcccctccaacttccttcatccgctttcttctgtccaagctgctcctcgctaggtctccctgcggtcgactcctcacccggccgtactcgagcaagccatcgttccgcccggacgacctgacgcgctacgccgttgacagcaggcggcgcagcaggattcgatccccttccagctcgaccgcgtcccctcgccgccgacctagcaagcacctcagctcgatccgctagacgggaaggtctggtccagacgcaatgcttcactcgcgagcccgctcctccatcccacagccgatggcctcgccttcgatggccgtctcgccggcagcgctcgggctgcctccggtgttcgagtggcaggcccaggaggttgcctcgtttctcgcctcgctcaagtgcggccacctcgccctcgtcttcgagcagaacgacatcacgggcgatgtcattctcgagctcgacatgggtcatctgaaggagatgggcgtcacccgggtcggcgaccgcgtccggctccaggtcggcctcaaggcgctacgaagcagcaccttcgcggcggccgcatcgacgcccgtcactcctcggcactcggtcggcatgcgaggcagtccgtcgatcaccggcatccacgcaggcgtggagggcattgctcgagggccttcgccgaggccagaggaccagcccgggccgtcagaacctctgcgtgagcaccggccggacccccctttcgctaaagagcctcagtgctgactgcgcctgcccgacacctctcctctctctcgcagggacgatggtctcacacgtccgccagtcatcgtcaaacgattcacgctccaggacttcttctggcagctccgggcaccggccagcgccgctcgacatctcagggactgtcgcgcgcgatccccgcctgccgcaagtttatcagcccggcgcccggccggccgtgcctcgctcggcctcatcgagttccatcctacctctcgctgcggccaacaagtcgcagccggcgtacgttccgaggccgatcggctctctgcccgacgtctcggcgccgacgctggctcatcgaccgtcgagggacacgtccttgcggcaggcaagcaacgtgctcagcgggtcgacgtccaggcctgtgagcaacaactctcagcaaccgccagagattatgctgcctcctttgtcagagccgggtgtgtctggcctgaaggccgccgagctctcgaccgatgcagcaggcggctcctttaccgagcgccgagcgctccgtgcgctcgagcgcgagaacaggtctggccgaccatcgacggctcctggcgcgagcggcaacgcatctgcgccacgacttgcacctccgaccatgagcggatccttagcaacaccgagcagcgccgccgtcacgcttggggtcaacggccggcccacacctcttgccgccatgtcgtcccaccctttcgcgacgacacctgctaccccgtcctcgccatcttacccgcctctctcgtccgcctacccttcttcggacacgctcagcagctcaacggactcgtcaacgctcggcgcgtcgtcgactttgacgctcgcgctctcgaaatccaactcgtcgcttcggtcgaccggcgggacgacgccctcgctcgaggatctcaagtacaagatcgtcaagtttatcaacccggaagacggcaacacgcgcgtggtcgacgtcaccgactgcggcggcggctgggagatcatggagaaggtcttgcgcaagtttggcaagtggcgcgagggcggcagcggcgctcgcggcctcagcgtcgccgacgattcggacgacgacgagggcaaaggcgccgtcgttttggacggctggggcgtctatctcgaggggtacggtggggaaggcattagtcggtcctcttgccctcgactcttgcgcgcacctttttctgacaacttatcgagccgtctaccacaggccatccactcaccgaatccgagcttctatcggtctgccatgctccggtcgactcgcccgctcgaaaccgtggcctcacgctcaagagggtcaagaagctcggcaaccgcaagcaggtcgagcgcttctttggcgaggcgccgccgcagccggcgagcccgacctcgccgacatacttcgcaggcgtggcgacccctcgcgggaaaggtggcctcagtgcgggcgccaagaagatgaaccgggcgagcaccatcagcgtcatggctggcctcggcgtcgacggtcttaatcagggtcagccgccgccacctccgccgctaccgccttcgccattgccggcggccagacccaacgtattgagttcgagtccggtcccgactgcggctgggacgtctgcaacgcgctcgccttcgtcaggctcattcctcatcagcaagggccgcaagatgtacaacttcttcggccaccggcctccctcagaactcatctcgactcatctcaccgagtacttccccaaagtgcagaaaaaggtcctcgagcggacggcccgcaactcgatgatgcgcatcacctcgggcgacggcggcgctcgaagcagctgggctaccggcggcggcgaaggctctgcccggctcagctcgagcagctttggcgactcgatcgtgtcgcctcgcaagaagcgcatcagccaaggagcgcgcagtatcgcgtcttcgaacctcagcggcgggaccaggagccacccactccatcgcacgtcgacctcgccgccgcggccagtcattccggaggacgcctcgccggacgatccggccgacctgccgcgcgtgtcaatatcgaccgacggcgtctcggagtctgactctgaggccggctcagtcgactcgcgtccgccgctgctgccgccagttgacacctcggccgactcatggtccgactcgctctcgatctactcgcccaactttatcgccgcaggcgacgccttgcggcgcaactcgatcgcctcggcgcggccgatgagcctgctgtcgcagttccgccggaagaagaaggacatgtcggatacggcctcctttcttacggtcgacgagatcaccgcccacgtcgacagcaagcgctcgagtcaggactcggcgtcggctgccgaggacggcatcgaggtcatcgacgacgaggagctcgacgaggacgacgaggatgctcgcacgccggccccacctagccggcgcttctctcgcggctcgcggcgtctcgaccgcgtcatgtcgtactacgagagcagtcacggctcgggcgaggacgaggacgagggggtgtacagcgacgaagaggacgaggacgactatgaagaggacgaagacggcgaggacgaggacgacggggccaccgacgagcagggcaaagcttttctctctgagggtggtgcgtgcgactgcatcatctcgagcttggtctgagcgctgatgcgcccgccttccccatgcaggaaagcgctccttcaagtggatcaagggcgcgctcatcggctcgggctcgtttggctccgtctttctcggtatggacgccagccgcggcctgctgatggccgtcaagcaggtcgacatcccgaccggcgtgtcggccaatgaggagcgcaagaaggacatgctcaacgcgctcgagcgcgagatcgagctgctcaaggagctgcagcacgacaacattgtgcagtacctcggtgcgtctagacgcaggcggctgagggtgccgcagacggctgactgatcggctccgcatcgcctgcacagattcgtccatcgacgccagccacctcaacattttcctcgagtacgtccccggagggtcggtgactgcgctcctgagcaactatggcgcgttcgaggaggcgctcgtccgggtcttcatccggcaaacgctccaaggcctcgcctacctccacgacaagggcatcatccaccgcgacatcaaaggcgccaatatcctcgtcgataacaagggcggcatcaaaatctcggactttggcatctcgaaaaaggtcgaatcaggtctgtcgcaggatgcttcagacggacgcccgacgaagtggccgccggctgacccattgggctgactccctcctttgcagacctgctcgaaaactcgaacaatcgcaagtcgctccaggggaccgtcttttgtgcgtccagctttccttacgacccatcctcactcgcccgacgagctgacactttgctgcctctgcatcagggatggcgcccgaggtcgtcaagcagacggctcacacgaccaaggccgacatctggagcgtcggctgccttgtcgtcgagatgctcaccggccagcggccctggggccggctcgaccagatgcaggtcatgttcaaggtccgtctctcctggcgtcgagaacccttcttcctcaacgctgacctgcgcgcttctcatacagatcggctcgctcagccggcccgagcttccgcccgatattacgaccgatgccgaggagttcctggagaagacctttatgctcgactttcacgcccggccgaccgcggtcgacctgctcgcccacgcctttatccaagtcgacctcgactcggccgagactgcctagcagctgatgcaatgccgtctgtcgacacctggcgcgaatcacgatgcgtgcggagatggttcatagtctagatcatgcgagcgcagagcggcgcttagtcgcccgtcatgcgtcgcgcgtgtgactgggtcgggctcgcaacctgcggcgtaaacgagccgccgttgccaaagctgacggtgccgccggtgagttccatcgaggggttccagccctgccgcagacgaaaggttgaggagcgagtcagcacaggggggcgaggggcgagcgaagcagtagggcaaggacggaccggcaggagatgcgagtcaaagatgcctgagttggtcggccagatagcctcgaggttgagaccgggctcgcctccgccgagggccgtctcgtgcccgccccagacgccgtcggcgccaccaaaggtcgagtagccaaagtcctcgccttccgggaacgttccgccaaaagcggtcgtccagtcggtgaagacggggctcgtccctcctggggctgacatggcgccgttggccgtcggcgcgagggtcgactcggccccgagcccgtctgcgccggccggcacgggcgagttctggcgcgtcgcgaaccgcgtgtggctcgggtaaggcgtgttcggcacgctgttcggccgcgactcggtcgacgagaggagcgatcgcaggagctgggcatgaagcgccggcgtgtgcttcgagtcgatcgcaacctcctcgagcaccttgacagcgctgtggacggcgtcgagaatcttcgccggcgactcgaggtagattgtcagctgcggccgcagcagcttgagcagcgacaggatggcgtaagagagcctgcgggacgagtagctggtcagctagggaccgccagcaaagcaaaaagcaaaacaggcagagcgcacatggtgaaggtcgagtcgggcgcgtaggtcagcttgcccgtcggcgcaagctcgtcccgagcgaccttgataacttccatcgccgcgccggcgacgcgcgcgaaaaagtggccgagttcaatgtgggcccgctcgagggagttttgcagcccaaacgagttcatcatgagcagcgcgtctggcgatcgccagaggaaggagcacaacgttagcagcgcttcgggcgtcaagtcgacgcagacgcgagcggcaccgacaggagcagtagaaggagccgacggatcgcgagtggccgagctgaggccggtcctcctcggccgactcgttgtacagttggctggagcgggggacggaggcgatcatcagcaaaggtcacagtgtccctttgagagtcaactgaagcactcactcccaagcctcatgccactgcgtgtcccagacgctgagctgggcctcaatcgagcgcaaaaagagcgggtagtcgaggtcggtctggaggcccgaggcggtcgacgttccagagtagataaagtcgagcgcgcggctcataatctgctggaggccgacgtaggcaacgagcccgcgatcggtgtaagtcgcgaactgagacgaggccgcccaggccgtcttattgcggatgatgaagtcttcgcggatcgagtagggcttgcccatctgcgacgagagcgagcggtcgagcacgtagcacatgctgcgtgagaaggcaataaggcagagcgtcagccgctgcagcaggtggccggggtctccagtcgcgacgcacagccacgtccgctcgcggttgatgatctcgcgatcgcgggccttggcctcctccgtgtccttgccggtcagctgcgacttgcggtgcaggttgaggtcggtcgcaacgcggatgcccatgccgagcagcagccactgagaacggatcgcagataaggggtcagcatcgtctgcccggatgagggagagcgatgaactgctcaccgcctgatccagctcgaagcgctcgaccggcaggccgtagcacgtcaggatgagataggcctggacgatctcgacgctcttgaagccgtggctcggcgtctcgaacgcgagcttgcggacgcaggtgttgagccggccgacgagctcgggtcgcttgctgtagaacttggaggcaacccagcagactgcggggagcaaagtgtcgggaggagagtcagcgtctggcggtcttgtgcgacgcaagtgagaagagcgagcgggcacgaaccggtcgtgagcaggaagggcgagcgcgaggcaacgagcccgggcgtgtggaaggctcggtcgaggaccggcacctggacattgataaagtcaaagtagatcgagaagagctcgaggacctcgtccgtcgagagaaagtcgaggatctctggccggatcgagcgctcgatgatgatccgccggaggggcagcatctgagatgaaacgagcagcatcagtcacgagatgctcggctgcacagcctgtcgagctagcgctcaccgtcattggtcccggcttgaagtagacggtcgaggccaagccgagcgggacgtcgtcctctgccggcggctcgtccttgacatccttgccgcccggagcagactgagcctccctctctttgcccttcccgccgtcgtccttggcgcccgtggcgtccccggacaacctagcaccagcaccgccggccgccgctgcagagtaggcagcagaggcggacggcctgcctggcgcggcagatccagagctggcgccggcgataggactcggcgggcgcgagcggaggtcgctcgagccgccgtggccgacgagcggcggtggccggcggcccatcacgcggtggactttggcaatcgcagcgttcgtgatggcctcgtcgtcggccgctcgccggcgagcgtcctcgtcgtccgcctcgtcgaccgcagtcggccctgcgttggagcctgcggccgagcctgggccagcgccgtcacgggctggcgtcgaggcagcggctgagccggccctcgcgccgctcgcatgcgatgacggcgtcgacgcctgctggagcgcaggctcatggttgaggaggttgcggacgagcatgccagccgccgcgccgcgagcctcgatcttccggtggttgtggagcgaggcctcggcgaggaggccgagcgggttgagcgagttgtcgggcagcgagtgcagccgcggcgagtgcgggcgggtcggcacctggggcggcggcgggttcggcagcggtggctggccggcactgcctgaggcggggccgccggacgaggacgaagcggacgagttcgggagcgcgtgcaggggcttgcccgacggatgctggaggtggtggtgctgatgctggaaggcgtgttgcgggatcgggtacggcggcgggtgcgcaccgggaaggacgggcggcgcaaaaaaggtcggatgcgagcggccgtttgacgccggcgaaccgtttggacctgcgaggccattgttgccagcaagatggtggccgctcagctcgcccgcgtaggcagggtgatggctgccgccgggaaggcctccggccggcaagccgctccctcctccaccactgtcgatcgagcggatgcccggcaggccagtttgaccatcaggcatcatcggcagccgcgccattgccgctgccgtcacattactcgacccgccggcgccaccgctcggcgaagggctccgggtgaccatgcccgaggcaaaagcggccatggccgggttgtggatcgagcgcaggacagtgtcgagcgtctgctccatcttcttcaacgactgagccatcgcttcgtgctttttggtcgatttcttgccccgatttgactcttcgaagatgcactcttggttcgtcgctttgcagcgctgtggacgagtgcaagaacgagtcagtcgaccgagcgcgggccagctgctgcatctgcggagagggacggaccttgcagggcgggccctcctcggagaagcaccgcatcttgagcttacggcagacggtgcaagctctggcaaagaacatgaaaggaaggagaagacgcgcgcgccggtcagcgacagtcgcactctggctcggtcctccaaaccaagcatgtaaagaaggaaagaccgcaccgactcccgcgtgtcgctttgggcttcttgccgtcaggcccgagctcgaccggcttgcccttgccgttgagcggcttgccgaccgcacctgccatgcccgccgacgaggccgctcctgccgactgagcggccgccgagcttttgacctttgacttgcccttgaccgagggctccgagccgtcctcgtcctcatcgtcctcctcatcctcgtcctcctcgctctcctcactttcgtcctcgtctgacgtcgcaggggccgcactgccgccgccgccgccgacggcccgcgccgtcgagctctgcctgcgctgcttcttgacggccgagccggcgcgacctccgccgcccccgcccccgccggcactgggaccagtcgccgagagcgtgcgcgagaggtcgggcgtcggcgggcctgaggacggatggggccgcttgaggccgagcagggcggtcgccggtgagagctgctgttggcctccgccgccgttcgcgccgccgacgtggccgcgctgctgctgcgcctgctgcatcatctgctggtgctgaaggagctgctggtgctggtgctgctgggcaaattgctgctgctggaagtggtgggcgtactgctgagggtggaggccctgctgttgctgctgctggaagccactttggacaaacgggccctgctgctgctgttgctgctgctgaggatggtagccggcaccttgctgctgctggggctgcgtctgcggcgggagctggtacgtcgccacgagcgccgggtcaaaggcgtcgtagccaggcggggccggatgggggtagggctggtaggcgaacgccggctgaggtccagcgccggtgggcgtgctgccactgctcccgccgccgccgggatgaccgccgtggccgtttggcggaggggcagggatggacggcgaccgggcggccgaggtcgaaggggtcgaggtcgccgaccagggctgctgtggctgctgctgctgctgctgctgttgttgcgggttgcggccgtgcgcgtagccggcagccatggcgggggactttccggcggcgggggtttgatcgagcgtcggcttagcgggcgagccggaagccggaaagtcttcggggcaggtgggttggcgggacggaagggcgacgtgtgggcgaaggcgggcgacgaccgggaaatcggcaagcgagaagaccgggcgggcaaagggcgggccgtcggcctttcgctgctgccggtgcgttcgagctgggcttgagcgagctgggcttggcgatgcgtcccggcgaggcgaggctggcaagctgatgagatgaagggtcgtgcagagcaagcgtcggcggcgactgtgcttgcgtgttgctctggtcgagcaggaggaggaggaggctggccggccggcccccctgtcttcctttcctcctgtcgcagcggcttgagtgtcgcggcctggcgtgtgactgcagttacgcagcgaggttacaccttgggcgtaagcactcagccccggaagccaggagccgtcgcagcctgaccagccaggccagcagcagcaggcgccttcctcctccgagcaagctcgaggattgcgaatgcccgagcctgctcctctgctctcctgcctctggcgacggtgtcgacctgctcgacacgacagaggggcgaccgaccgaccatgcgcccccggaccgtccgacccgaccatcacattgcccccgacgcctcatgacgcgcgggagcacaagtaggcgtctctcggcggagggccatcggcacgctcggtgattcgcccccttcagcccactcaacttcagcccagctttcgcccacccattacccaccacccctcccttcccatttctcgtctccatcgtgcgtgctctctcttcaggcgacctcttgcccctcgcacacacagcctgccgcagcgactgacgccttcccttccctccctctctgccatcgctccctctaacctcatcccgctcctcacccgctttagccgatcctcagtcgccacctccctttcccccaattgtttttcaccacctctccccgactgtatccaccaccaccgctctctccctcaaacatgcaggctgtcaaggacgggattgcggccggttcgttccatcccgtttcgaacgcgcccggtccctctgcactctcgccgatggccaccgtttcgctgactgactctctttcttcttcctccgcctccaccggactcgtttctctttgcagtgtcgaacacgatcgacgcctcgaagaacccgaagcgggcccagctcgaggaagacattgtcgacccgccgtcgggctgcccgatgaagacgtacttcggcatgaaggtctcggtcagtcatcctcattcccttacacgttcgccatcgttagccgctgacattctgcctctcgatcttaggacaccgacaactcgatcaaggccggcgttggaggcccgaccctgcttgaggacctccacaaccgagagaagagtcagcgttgccctcttccctgatgccgaatctccgtccactaaccaccgtacatgcttccttttgccctgcagtctcgtcgttcgaccacgagcgcatcccggagcgcgtcgtccacgcccgcggtgccgccgcccacggcaccttcaagctccacacgccgatccccgagttctccaaggccggcatcctcaacgacacgtcgcgcgagacgcccgttttcctccgcttctcgactgtcggcggctcgcgcggctcggccgactcggtccgcgacgtccggggctttgccgtccgcttttacaccgaggagggcaactgggacattgttggcagtgcgtcccaacatcctctttggtttcgcaggtctgcgcaaacgactgactagacgccgcttccctctcgtgctgcagacaacatccccgtcttctttgttcaggacgccatcaagttcctcgacctgatccactctgtcaagcccgagccgcacaacgagattccccaggcccagacggcgcacgacaacgcctgggacttctttggcctcgcgcccgagacgatgcacacgctcatgtgggccatgtcggatcgcggcattccccggtcattccggatgatgaacggctttggcgtaaacaccttctgccttgtcaacaacgagggcaagcgctgcttcaccaagttccactggctgcccgtgagtgccgcgcgcgcccgcgtcgacgctctcaattgatacgcgacgcgtgctaactcgcccttgtgcctcctctctctcagaaactcggcgtccacggtctcgtctgggacgaggcgctcaagctcggcggccaggaccccgactttcaccggcgcgacctgaacgacgcgatcgaggccggcgccttccccgagtgggagcttgccgtccagattatctcggaggaggacgaggacaagtttgacttcagtgtgcgttcttctactcgcctccttgtaaaagttccggtctgacgatcctcctcttcgccctctttcagattctcgacgctaccaagctctggcccgaggagctcgtcccgctcaagaagatcggcacgatgcagctcaatcggaccgtcgacgactacttctccgaggtcgagcaagtcgccttctgcacgcagcacattgttccgggcatcgacttttcgaacgacccgctcctccagggccgcaacttttcgtacttcgacacgcagatttcgcggattggcgtcaactttcacgaccttccgatcaaccggccggtttgccccgtctacaacaacctccgcgacggcaagatgcagcgcaagatccaccgcggcaccgtcaactacagcccgaaccggttcgagacgcctaaggtctcgaccgcggccgagggcggctttgtcccttaccctgtgcgtgttcagctcgtgcgcccgcgtctgatcaaaccggcgggctgacctccttggtctatcctctctcaggcccccgtcagcggcgtcaagtcgcgcgagcgcccggccaagttcaacgagtactacgcccagcctgccatgttcttcaactcgctcgccaaggttgagcagcagcacatcatctcggccatccagtttgagctcggcaaggtcgaggacgagaacatccacaagatcatggtcaagtcgctcaacaacgttcgttctctctgctgccctttcgcgtctactcgccgttgtctctcgtcctgacgcccctactcccctcgctcgcgcaggtcaaccacgacatggccgcccaggtcgccgaggcgctctgcatcgagtgccctgccgccgtcgaggtctcgaccaagacgactggctttgtctcgatggtcaacggcgagcaccaggtcttcacggccgagggccgtaaggtcggcatctatgtcctccccggcttcgacgtcaaggcggtcgaggctgttaaggctgcgctgacggccgccaaggcgacgccgatgctcgtcggcgaccgggcaaaggtcaagggctcggacggcgccgcgcacgcgagccagtttacgctcgagacgtcgcgctcgacccactttgacgctgtcgtcgtcgtcggcggcgagggcgccgactacgccacgaagctcaactctggccggatggtccacgtcgtccgcgaggcattcatgcaccacaaggccatcatggtcctcggccaagccgtcgactgggctgccaacctcgtcctaccggcccagggccttgacctctcgggccaggacggcaactcggccggcgtcgtcttctcgcgcaacatgcccgcaaagacgcttgagacgttcgtcgacctcgtcgcaaagcaccgcgtctgggaccgcgacgtggcgaccgttgccgcctaagccgcggtcgagtcttgtctcgctccatcttttgcatctgtagctcgcagcgcccttctcctccctgtaccgctagatcaggactcgtagcaaagggattgcatgcccgtctaccttcatcttcgcgtgttaagcgatcctcttcattggcaggcaaggcaggagagcgtcataggtatcgcgtcggtgcgagtgagtcgtgatgagagaaagatgtcggagggtgcagggcgcgatcaaaggcgggcacgcggggcgttggcggcctgtagtgtcaacgcatcagcaacggcggcgggaaacttgaggcgaagagcgaacgcacttcgagctcggccgcgtagcggctttcgatggccttgcgcttgggcttcagagtcgccgtcacgagcccagagtccggatcccagacatcggcgacgacaacgacagcgccgagcagctcgcgccggctgagcccggccgctttgccaaaggcattgacctcgccgaggtaggcgcggcggaccttagggtcagcgacgacggctgcgacagaggtcgggtcagtcgccgacgccgtcgccggcaggagccctcgggtctggaggagcttgaagaggttggccgcatgcgggacggcgacggcgctgacagagtcggcgccgacggggacgacgaggacgatattggcgaccagagggctcgccttcaggacagattcgagcttctcaagcgcaatatactcgccgtttggcagcttgaccaaattcttgatgcggtcatgcagtcaggagctggctgccaagaaagcgcagggaagtgtcgcaccttgagccggtcaacgatctcaagagcgcccgccgcagtaaagcgtccaatgtcgccagttttgaaaaagccctcctcgtccaaggcctcagccgtcgcctcgggattcttgtagtagcgctggaagacggccggtccgcggatgaggatctcacccgaggggagggcgtcggttgagcggtagccgctctctggccgatcggcgagctgcagcaggggaaggacgagtcagcgcaaggccaagtgttcaggaaggacggccagaggctcaccttgacctcgacgcaggccatcaggcaggcgccgtcgccctttgcgctccaggtcgaagggtgcgtgagcgcgcccatgccgatcgtttccgtcagtccccagccgttcatgatgtcggcaatgcccgtcgacttgaaccaggcgtttgtgctcgcactgagcgcggcgccgccactgaggcaggcattgagttgaccgccagtaaaggcccggaccttggagaggacgacggcgtcgccggcctgggcgaggagggggataccgttctccttggcccagtagctgaggctgaagagcccccgtgtgacaggcgaggcctgcgagagctggagctcgaccgccttgcggatcgtctcccagacgagcgggacggccccgatcgtcgtcggcttgagctctgcgaggtcgccctcgcagttcttgacgccggtcgccatcagcgtccgcgctttgccaaagccgctccggacgccctggaaccagaggttcgcagagttgcaagactcgatggcgtgcgcgagagggagaaaggcgcaatgcgactgctcgtaggcgtcgacgtagtagtcgtcgagcaggcggtcgatggcggcgacggcgctgagcatcatccggtgcgtaacctccacgcccttcggcaggccggacgtgcccgacgtaaactggacggcgtagaggtcgttggccgtcggcggcgttggcggagctgggtacgcacggccgaggcggagcagctcgtcgactgtcaccggccggatgccaaggtcgcggatcgcttggagcgcccggttgtcagcctggccgtcatagatgaccgagttgaccgtcggcgtgtctctgaggacgatggcgagcttcggaatgaggtcggcctgggtgaagacggccaccgagccgggcaagttgatcgtatgcttgaggccgtccgcgtcaagcgtcgagaaggccgtcgcaaacggcgacgagatcgaggccgcgcccatcgagacgagccgccagttgaccgacgattccgcgtagagggtgatgaatggggcatcggcaacggccgtagtgctcgctgaccggccaaggcccaactggcggaggcccgccccggcctggagcatcacttggcgcacctcaatgaacgacagccacgagtacgctagtaagggcgggtcacgacagattcagtaagtgagcctatgtaaggcgcgagagagcacagagggccgacgcacgaccgagctcgtacagttccagggcaccctcctcggcgggatggaccttgatgaccggccgggtgccgagaaagggccggtctccgtgctttgtggccgcatagtcggcgagatccagcatcgtgttgacgccctcgcacggacctgtcagccagaggcgttagctgcgatggaactccgagggtcagagcaaccacgctaccgactggtgacgagcggctccttcttgccgaggacgtagctccgccggaccctgcagcagcaggcgtagtttgcacgtcagccaaggggttcggtcagctgcctccgagaggagcgggaggagcgggaggcagccagaccgacctcgtctctccgacgggcttgccgccgccttcggtgcggacctcccagctgagcttctgaccgcgcttcggggcgaccatgttctatgcgctgttagggagggatgaggatcgtctgatgatcgtagactcttcgagcggttgggggagcaaacggaggtgatggtagagaggagacggcagggagccggcaacctcccggctgtcggtctagccggcggcgcctcgggccccgcacgcgcgctcaccccccccccctttgactagccggccaccatctgactggatcgccaccagacaatttttggcgacctctcctgggtcgtaggaacccaaatgtaccggtctcgcagcgctccgataacatcttgaataaaagtcactcggcccgcgcaggggcgggatccccgggcccccttcaaggatttccggccgtccctgtgactggatcgccggcagacctatgtcagcatctcgcctggtcctgaccaaccagcctggcaaaatcccgtttgaatcggataagattcggtaaaaaagtatgtaccccttgccggggagtattgtcgtcctagccggcgaaggcgcgcgcagccgaccctcatcctccggccggctcactcaccgctgtggcaagaggttgggcaggtgcgctcagccgcacggcggtcgctcgtagccagcgaccgctcagtcggcagggtttgatcgcagcgcatcggtcgcgcagctcaaaaggaaggtccacccaactaagcaacgacccaggccgcaagaacccatccagcagctcaacccccgcccgccggccaatgcaccaccagcgcctgccagacgtccgcgcctcgcgcggcgcctgctggctcgccgtcgaggtctttgcgaactgtcggctgcgacgcgtttggttcgcggctgagcgggcgagtggggtgccggagcggggggtcgaggagctcgcgctgttcgcggcggaggccgttgaaggggaaggggaaagagggttcagctcatgaaatccgtctcttcgtctctgcattgctgcttctggcagacctcgatccgaggttacagcccgtcgtcaaacaggcccaattttctcaactgtacgcacctcgaaagggatcactgcgcgtccggttcgacctcggtcggcgtctcgggcgtcaacggcgtcgtcctcccgcccgtcggcggcacgctcgcgctcgacggccccttcggcttgggcggcgcccgcggctccttcgtgtcaaagatgatcgttatcgggccctgacgctcgcatcattgctcgctgttagctcgcatgcctcgagcaaggggaggggcgcgaggggggggacgtacgtcattgaccgaagcgacctccatcatcgcgccaaacttcccatcgctaatccgagaagggtcgtacgccctgcccagcgcagcccggacagcatcgtacatctcctcggctgggccggggctctgacggaagaagaagacggcaggcgcggtgagtgagtcggtcagccggtcgtccgcagctcgaccgaggcaacagaaaggagtagaacggaccatcgcgccgtggtagtcgggctttgagcctttcttgaccttggcctgcaacgtgaattgcgagactgcgagaaccggcctttcgccgtcagccaataagcgcatcaagcgcaaggcgagcctcgcgcaagacgcaccgcaaaggatggacccgccaacgtctttgacgctcgcccgccagggctcgtcgtttgctccaggccagaggcggagcgtgaggatcttgttgacgagcgtcttgaggtcgtcgggcgtgtcgtctgggtcgacgagcgggtcgggcgcgcaggcgggcggggcgaggcacagcgcgatgggtcagccctctttcctgagttgagctcctcacagaatgacgtgacgtaccggttccgatgccgatgagcgcgagtaggccatggtcgatggacgagatgacggcgccgtcgactgctcgagcccgaggttgaggttgaaaggggtcagcccgatgagcgatggcagatggactcaacgggcagcggcggcgcacccttgacggacgcgctcaggacacgcgtgaggactgccttcatgcctgcttggccgcttcgtgtcagtaggttgtcagtcgccgttgaaagtgagccgggcgacgttcgtctctgtcggcggcgttgggatcgttgcgcgcggcgagctgctgccgccggggggcgttttctctcagcccctccgagaggagcagctccgaacgacatccaccctcccctcctccccctcgctttcctatcctctctactcccaaaaggtcctcggcggctgttcctctgcttgcgcactcgcacccctcgtgagtctgacgctcccgctgccgcctgtcgtgagagccggcacaaggcgctgaaggtctttagcacccttttcgctcgtcctgtcgcccctgtcgaccgcctctccgccacctcgccagacctcactcgcatcgctcagtaaaaaaagttctctcgcttcctcccatatgtccgcctcgtcctcgtccgccgccgctccgaacggcagcacctcggcctctgccccggcctcggccggcgcgcccgccgtctcgagcaagtctgcgatcacgagcgccgacgtcggatggcaattcgtgccccagtactagtacgtcctttcacgtttcttctgccgccctgctcgtgcgcttgtccccgattcggttccccgtttgagatcgggaggaggcgctggcctgagagcgtgtcttggagtgggccgaggtggaggagaggagagcggctcacccgaccccttgagagcagatctcgggccctctcgccggccgtgcctgctctaagtcgcacggtctgcgcttgctgtgcctgcctctgggctttatcacgcagactggcgtccaaagttgggccgtggcgttgcgagtgactcgaaagccaactttcagaggcgctgcgccgatttttccgctgcggcgggctcgaccttcatctcaccccccgggactcgcaacgtcgtcatgcgccgtcgttcagcccaactgaccggcttcgtctttcggatcttctcgctgcagcacctttgtcaacaagcacccccagcggctgcactgcttctacactaagaactcgaccttcatccacggcgtcgagggcgaggatggcctcccgtgcaccggccaggccgttcgtcctcttgcactgctcgctgcctcggcgctgtcctcgacactgacttactcgggctctgtcttgtaggcgatcaacgagcggatcgaggccatcggcttcaaggactgcaaggtctacattcactcggttgactcgcaggtgcgcccggcttttcagcacctgactgcctcgcccaaaccgcttcgctgacctcttgctcttttcttaacgccctgcatcttcagccctcggccggtggcggcatcatcatccaggtcattggcgagatgtcgaacgcctctggcccgtggcgcaagtttgcccagacgttcttcctcgccgagcagcccaacggctactttgtcctcaacgacatcttccgcttcctcaaggaggacacggtcgccgacgacgaggacgaaacggatgaggtcgtcgacgactatgtcaaggttgaggaggcggtcccggtcgccgtgcccgagtcgaaggtcgaggtggccgagaaggaggctcccgtcgtccccctccagcaggaggaggcgccgaaggccgccgagcagaagatcgaggctgctcctgctgctgctccggccgccgagaagaaggaggaggaggcgcctaagtcggccgtcgaggagacgaccgaggctgtcgccacgcctgagccgaccccggtcgctgccgccgccaacgggcaggccgataagcctgccgagactccggctccggccccagccgccgccgctgctgctcccgccgaggctgagaagcctaccgagacgcccgccgccgctgcccctgctgccgccgctcctgcgcccaaggccgcccctgccgccgccgccgcgccagccaaggccgctgcacccaagacgtgggcctcgcttgccaagaccggcgcttggggcaagcctgccgctcctgccgccgcgcccgctgccgctcctgcgcctgccgctgccgctgccccggcgccggctgcccctgctgccccgaaggaggctgctccggcgccggccgctggcactgctgctccggctgctcagggccctgcctcgggcaagaagctccaccccgctggcgaggccgccatggttgtgacgactccgcactgctttgtcaaggtgaggagtttggcctgacctttcttacctggccaatcccgtccgctgaccaacctccccccctcctccccttctttctcgaagctcgccaattgggctgcgacgagcgccgaccgcgacacgagcatcaacccggacactctccgccaggcgcttgaggcccgctttggcaaagtcaaggagattgagattgtcaaggctaaggcctgcgccttcatcgagtttgagcaggttacctcggcccggcgggcgatccttgcctcgctcccgcccaactttggcggcgagggcggcatcaaggtcgaggatggaaaggtcctcgtcgagacgcgcaaggagaagagcgagcgcggcccgcctcgcggcggcccgcgcagcctccagacgggcggcgcgcccggcggcgccggagccagcggaaacaacaacggcccgcccttccagggccagcctggcgccggccgtggtggtcgcggcggcgctcggggaggccgtggtggagcccagggcggtcggcctccggtccccgccgcaccggccgccaagtaaaacgaactatccgtcgtccttcggccctttgcgccgtcgtgctcgtcgatgaggagagcggggtgcaagtccctcaccctttcccctgccgagcacgaccccctctcccggtcgcagtcatcgtcgagtggagaagtcttcctcctgggagggggagcggaggggcgggcgcagggaggtcgcgccgcgccggcgtcccgcggggtgaggagggggagggaagaaggaatttggtgttgtcgcagaaacgtcctctcatgccgccatgaccatgcacgctttgttcaattttcccaccggctgacagagagttgcaagagcctctgctgagccctgtacgtcggaggcgactctgcacaggtcgctcgaagcgcactgacagcctgatgcacgaagcctcggcatgcacgctaggcgacagaagcccacaagatgcacaacaggccatgcgaacgagcaagaatgaaaacggaggaagccgcaagggaagagaagaagggcgtgacgccaggcaagcgtcgtgaggtgcgcggacgaggaagcaggagacgaccgcgccggatcgacatcttgcacccagcccggcagtcactcctttcataaaccgctgggggcccggtagaaaggcgtagacgattgccgccggcggtgcgagttgccagacgcgaatgagcgacagggcgcgggcccgcttagccgttgatggccttcgagcgacctaggcgctgcagatataacagagatgatcgagtcagcagtcgtccagagctcgtaccgtccgcatcccgccagacgccgtctctcgacgaccccgataagcgtgaaccgaaggagacgcaccttcttcatccgctggagcttcttggccgacatcttggccgccatctcctcgagccgctttttctcctcgacgcgctccttgcgctccttgtgggcctgcttcttactgcgggcgggcaaaagacaggacaaccgcaatggtcagccttgtgactcgcgagggggacggcaggcgctgcgcgagcccagccggccgttttatggaggagcgaaagcacggaccgctcggcctcctgctccttttcggccttgagctcgcgctcgagcagcttggttgcctcagcctttttgcgctgctcaacccggacgtcccagggcgtcttgacgccggccgggaggtgggtccggctgagggcaaggggcgagggtcgacgagagctgccggtcagctgtgcccaatcagagagctgagagggcgaggcgagccataccgtgtcgccgtcttgggctccttccagaactgccgaggaagagagcggaagagttgcggtcagtgtaggtcgagcgagccaaccgctggcagcaggcacgacggctcgacgaaccttgcccgagacgcggccgcccgacgtctgcttgagcgtcgccggtgcgttcgaggtcgaggccaaggtcgaggtctctgccggcgcggtggtcgaagaggaggacgaggtgggaggagcagtcgtgacgggcatcttgacgaggaagagtaggtgggcggtccagggcccagtcggctgcgctgcctcgccctgctgctgccacaggggcgaaatctgcctccactccgcgcgcgcgcgaaggcggagagagactgcgcctgccgacccggactcgacttcgccctgctcgacctcggaccactaccaccctctcagctagcaacgatgggaaaggccaagaagactcgcaagttcgctgccgtcaagcgcatgctcaacccggccgacccaaggctgtttgtcctccccccggctcgcccttcctgcggagcgcggtcaccccgagctgactgtctcgccgtcgtccctctcgtcgctgccgccgtgcaggaaagccaacgccgagaaggagttcaaaaagaagcaggaggagaaggaggccgagaagcgtgttgtgtgagtggacccttgttctgctcctctcctccgatcgagctcgaaggcgtgtgccgctctggcctgtgcctctctccctgtgaaccctgctccggcagtgcgggctagcgtgtgcccgccagagaacgcaggcgttctcgcaatgtgctgagggtcggtgagatctgagggcctgcccgacgcgccgcgcccctcggagttgcctcggctcgcccagtcgtcccgttccggcaccccctcagcccggtcgctgaccccccttctcatcccttccggacccttagccagaccgcgccggccaacctcttcctctcgcacaacccttcgcttggcccgccctaccgcgtcctggtcgacaccaactttatcaaccactcgctccagaacaagctcgagctcgtccagggcatgatggactgcttgtttgcaaagtgtacgtcctgctttgagcgcttccttctgggccggcttgcgacctggcgtgtgacggacgccgcaaaatcctgggctctagcgcctccggtccaccacagtctttttccgagacgttgctgcgtgcgccggcaggagcatgagtcgtcacactggttgcgagcagacgacgttgacttctgggcatcttgcttcttgcctggacgagcgaggctgatcggttctctttaacccttgcgcctcacaggcatccccaccatcaccgactgcgtcatggccgagctcgagaagctcgggccaaagtaccggatggcgctcaagtgcgtcctgtcgctcttgtctctcagcccgctctctcccttccgacgagggagggccgctaccttgatcgacgtcgaaagctgaccaccttcgccttgctacgcgccgcgccccttgcaggatcgctcgcgacccgcgctttgaccggctcccgtgctcgcaccacggaacctacgccgacgactgcctcgtccagcgcgtgtccgtctcaaagtgctacattgtcgcgacgtgcgaccgcgacctccggcgccggatccgaaaggtccccggcgtgccgctcatgtacatcgttagccgacgctaccagattgagcgccttccggacggaggcgtacgtccctttcctcccttccacttgcatctcgcacttgctgtcttctttcggaagtcttccgaaaggacgaggggctgactcgtccgcgtcttgatatcttcttcgtctttaggccccggcgtaaaggctctgctccctttccgccgaccttcacgccctgccgctcgacccctttacagagcccggacggcagcaagcctgcttcgcctagcatccgacaactggcgcatatactccgcccgccttgtagctgctctcgaggatacatatcctggggccgatcctgctttggccggctggtccgtccggagtcgatcccggtacgcctccgccggccttgtactccctcctcctcccgcatgtctcccctttcacgcccacagcccattcacagtttcgatccgcattattcctttctacttcgcacttgcagggttgcctccgcattgctgtcagacgacacgacccttcgccgctcagcgcgcagtagagacaccgtcgacagcgcgtcccaggaggatccggaccgtggcccgctctcgtgcagcagtctcttgcagcgcacactagtagcgatcctcctctctaagatcggccagctggcatgacgcgacgcgaagcgaacggctgtgatgacaggtgcccagctcgacaatgggccgagcgactggttccgtcgtctatattccgggccgaactcgcctgccggcgaagccgagaggacggtcaaccctcgagcccgtcacgacgttcgtccctccgaaccaccgacgacgtcgaccctcaccttctccctacgcacgttatggcggacagtagtctggcgctcgaaggccgccagcaggcggttgagccctctcctgccttccatccgccgccgccggcctcgccagcacgagcgtcggcgccgaccgtccgggcgacccgcacacgctcgtccgtcggcccgcctccagatccagccctccctggctcgcgcccgaccgagacgctcatgagccgcgtgcggctctcgaggagtctctacggcagcctcggccagccgggcaggggcatctggcacgacctccaggctgtgagttccaagctcggtcgagcagctcgccgagctctcccgggcggctttcgatcatccccttcccctcgttctgcgattgtccaactgatgccgtcgtccctccttgctctgcggctgcccgtctagcgtgcgccctactacctctctgactggaccgacgcctacaactaccgcgtcatccccgcgaccgcctacgtcttcttctcaaacgtcctggtccgtcccttgtcgcgctgccccatgcctgcccctgaccctcgaaggctgacggtgacgctccgcctcgcactttagcccggcatcgccttctcgctcgacctcatagagacgaccggccagtacggcgtcaacgaggttcttctctcaagtgcgtactggtcccgctcgagcgcagcagcagggacgagcggtcgtttgttgaccattcgaccctcccctgtattccctcgcctcagccttcctcgccgccgctacgttcagcatcttcggttgccagccgctgtgtatcgccggcgtcaccggtcagtctttctcagagatgccctcgtcctccgtcgcgtcaactcgctcacgccttctccttcccctttcttctgccccccttctccgtctctcttccccaggccccatcactgtcttcaacaagaccatctacgatatcatcgagggccgtccagatgcgcctatctacctccacttcatcgggtgcgccacatcaatgccttgcgctctcactcgcgcgcgagctgacggtccccccccccctcccgccttcagctgggtctacctctgggcggccatcatgcacgtcatatttgccgtcttttctggctgcaactttctcaaatacgtcaccaagtttccgtgcgagacgtttggcttctacgtcaggtgcgtcgctgccctcttcaacccccgttggctcacctgctcacctatctggccccgcactctttttctcagttgggtttacatccagtacggtatccaggtcctcaccaggcagtttggcctgccgaccccttccgtttatctttcaatcctcctcgccgtcctcacgctcgtcgtcggccaccttctcacaatcgtctcgaccctgccctactttcaccgccacgtccggcgcttcattgccgactacggcatgccgatcgccgtcattgcgtgttctggcctcgcgtactggggtcgcttccacgaatcgatcaatgtcgaggactcgcgcctaccaatcgaggcggcgtacacggccgctaacggccgggcttggatcgttcccttctgggagctttcgggcaagtgggtcggcatcgccttcccctttggcttcgtcctctttgtcgtgcgtccctgtcgcctcgctcggataggcgatgacaccgctaattagtcattgtctcgccagctcttcgcctttgaccacaacgtctcggctctcatcgcccagggctccgagttccctctcgtcaagccgccaggcttccactgggactttctcctgctcggcatcctcacgtttatctcaggcctgatcggcctgccggcgcccaacggcctgattccgcaaggtacggctctgagctcacgtattatcgcccgcgcgcgagctgacttgtcgccactctgcagcgccgatgcacacccagtcgctcgtcatcatgggcttcgagacggacaagaaggctgacgtcgagtaccagcagacgcagacgtccacgtcgacggcggtcggaaccgctgccggcagccctacagacggacttacgggcgagccgaaggacgaggccgaaatcacgctgcaacatagaggtgtcgagcggccgatcgccgtcgtcgagcagcgcgtgtcgaacctcttgcagggtgcggcctgcctcgtcatgatgacggggccgttcctcaagctgctgcactgggtgccgaaaggcgtcctcgccggtctttttgtgcgtccccgatcgagcgtctcttgcctcccctccgctctcgccagctgatccacttcctgtttgcacgttgcagtggctgatgggatcaggcgccctcgccagctcgggcgtgaccgccttgatcctgtacctgatcaaggatcgaagtctcaccgatcgggaagaacccttgcggcgcgtgcgcaagaaccgggtctggacgtggctcggcctggagctggtcggcttcgcggcaacatttgcacgtcgccattcgctattgaacgcgctcgtattcaaacggttgctgactctgatccctgccttgatgctaccaatcaggccatcacgcagacgaagggcgcgataggcttcccaattgttgtgcgtgccgcgtgcgctccagctatggacgaccaactgacgcccctcatctcccttccaccccttgaacgttagatctccctcctgatacccgtccgcatctggatcgtacctcggatgtcgttcacgaccgacgagctcgagattctcgacggcccggtcgcggcgccgttcagtctggcctcggtcggcgggacgctctgaaggtcggctcatcgccacgactcttaacgaactgtatctctaataaatgattgtcaccctgcatgcccaaccgcgagccgcttccttcacttcttagggccctcttgcgctcgagctcgactctcgagaagactggagcgaggccgctctatgccggctgccgcgtcgacagagcgccctccctccgctgcgccgaaatcaacatccgcgcgcgtcgaaacgcgaggcggctcgcgagctcctcgcgccgtctcttggtcgaccaacgtccaacctaagccgcgtccttccttcttctttgcagctcaagcagctgctcaggccctcgccgcccatgtcgttcaacctccaagaggccgtcttgacgctccaagatcccgaggatggcatcctcatcgacgatgagcttgacgtgccgtccctcggcgaacgcgccgtcgaagagtacctcgagcgtgtgtctcccttctgacaagcagatctcgctcgagagcagcccgttctgattgatcaatctggtcctgtttgtgctaggtgccatcgacgccgtcatcaaccagccatcctcgatcgcggagccgcagacgttcgacgtcctccagagcttgctcaagtcggtcctgctcgtcggctccccccaccctcacttgaggatcagtccgactgacgccctggcttgatcggactctgctcctttgcatccagataccaatcttcgctgtcgctcgcggtccagtcaaagctcatcgacacgctcctgtcggcgctccaggccgagatcgaccagtcgtcgcgctctcagctgtcggacgacccctcgtcgcacctcgcgcacaaggagccgctcgagcgctatgccttcctcatccagtggttcatcgccggcgccgagcgagctgcaacgaaaggcgagggcgacgtcgggcctaccggcaaaaagagcaagggcggggccaagtctaagaaggcagctgccggcggtcgcaagggcgactgggtctggcagcaggtcatccctggcgtcctcaaggacctcggcaaggcgctcaagctcaagacggatcgcatttggacgacaacgcaggagcgcgacacgttcatcaagtgcgtgcgcgagccgacgtcgcctgcggcgcaggagctaacgtcccgcgcctcgcgccagctgcttcacgcgcccggcgtaccagatcgccgagagcgaggcctacatgaaggtccccgacatcaagatgaacgtctaccgtatcgtctgctacgctgtcaagtatcacggccacacgtttggtcagtctgcctctcacagcagcggctgcgtcctcctcggctgaccccttaggtcactgttccaggcgcccagacgagcatcatccaaagcctccagtactttgagcacctgtctgagccgatggccgagctgctattgatcctctcgcgcgaatttgacttcagccagctcaccgaggacgtcctccggtacgttgcctcgagacctcatccgcgactggaagccgagctgaccaccagcaatcccctccacagcgagatctcgcagaaggacttcaacgcgcaggacacaaagggcccgcggtccttttccaagttcctgctcaagatcaccgagctctcgccgcgggtcgtccttaagcaaattagcttgttgctgacccacctcgacagcgaggtccgtgttggccggtcctctctctgccagtcgcttcccacagctgacatccctttctctctcgatcctcagtcgtacccgatgcggcaagcacttgtcgaaatcatcggcatcctcattcgccacctctgtcagaccgaggacgagtcggacgaggcgatcaagctcaaacagatcaccaacttctgggacctgatctttgcgcgcttcctcgacacaaacagctgggtgcgacagaaggtcctccagacggcgacgaagcttctcgagtgcgtctcttcccctgcgttcagacctgtgctactccggctcatctcgatccactctctcactggacccccccccccctcacccgtcctgcagcatggacaaggtcaagttcacgacgcagcgcgtgcgtctgactgagctcgcgatccggcacctcgaagacaagtcagcgaccgtccggcggcacgccattgcgctcatcaataagctcatcatcacgcacccgttcagcatgcacggcggctcgctcaacctcggcgagtgggaggagcgttacctcgtcgccaaggctcagctcggcgagctcgagaggaaggagcgcgagaacgcgccccagggtctcgaggcgatggagcgcgaggaggaggacgaggatgacgaggatgcagctgactcgggcaaggaggacacctccgaggccggcagcgaggcgccagaaacgcccaagaagaaggcaaagcaggtcaagaaggagaaggccgctgctgccgtcgcgcctccctccttgggcgagagcgtcgacccccgactgctcggctcggcccgcatgtttgtcaagtatcacgaggacgcgctccggctcatccgccagattgaaggcgcgatccccaagatcaacgaactcctcgtctcaaccggccgggccgaggtgctcgaggccatggacttcttcaagattgcctgggagtatcgcttcgagtcggccaaggtgagtggcggccggtctccagcagaggtctacggactgactcctcttttgccctcgacagattgggctcaagtcgatgcttcatcttatctggacgaaggacaacaacgctgtcggcgaggatggcaaggagctcaagggcatccgcgcgcgcgtcatcgagtgctacaaggcactcttctacgagccgctgcccgaccccgagatgacggccaaggcacaggttgcccgcattgccaagaacatgatcgagtgcgtcgcgcaaagggaagctttgctggcgctgtcgctgactcgcgccttgaccctctcaggcaaacctacgacaccaccctagccgagctgacctcgctcgaggagctcatgcggacaatgatggtcgaggaggccatccatccagatatcatcgctaaactctggcaggcctacagtgggtgcctagctcctatcctctacgggttgctagcctgacctgtgctcgcccgaccaattgcaggctcagaaaaggacctcccgcgccagcagcgtcgcggagcaatcatcatcctcggcatgctcgccatcgccaagcggtccgtcgttacggagcggctcgacgcgctcctaaagatcggccttgggccgtggggcaaggtgcgagctgctcgaaatgcgctgcatcacagccacttgcagcgcaaactgacaccccttctgcccctctgccccttcccaggccgacctgatcctcgcccgctacacctgcatcgcgctgcagcgcgtcggtggcagcgccaagaagatcaagggctcgcttgaggacaagacgacccggttgccaatgtcgcacccaatcttcagccggctcgaggaaatgatcaagacgccggcttcctcgatgcagtggtttgtccaacgccctggcttgctctggaatctatgtcgccctgacgctcttttgtcttggaatcttaggttcggcatggccgagcaggcgctcaacgccatctacctcctcggcgagcagcctgacgtcctggccgggacgctcatcaaggactttactgtccgcacttttgatgccgccggcccggaccaggtcgccgagggcatcgagggtctcacgcttggggagcgtgaagctgcgattggcgatgcgaccccgcctggcgacgacccggacgactcgatgaccgaagaggccaagccggtcggccatggcgaaggccaaggcctcaagaggtcttcgtcaatacgctccctcgcaggttccgacctcgtcagctcgttcgcgctcggccagctcatctttgtcgtcggccacgtcgccatcaagcagattgtctaccttgagatcgtcgagcgcgagcttaagcgccgcaaggagcagcaggctgccgcgagtacgtcgaaccactccggccgctgaggcccaacagtcgctgatccctgtcggtcgtgctcctctcacagccaaggcagccaacaaaagcaagaatgccaacgacctcgatcaggtctcgggcaacgccgaggacgacattggcgacaacatggccttcatccgcgagtctgagcttctctatggcgacggctcgctcctcgccgtttacgggccgctcatctcggacgtctgcgcgagcccggcccggtacaaggacccggtgctccggagcgcggccgtcctcgccctatcgaagctcatgtgcgtctcgggccaattctgcgaatcgcaactgccgctcctgtttcgcatctccgaaacggcgaccgatcccgcgatccggagcaacatcgttattgcgctcggcgacattgccgtctcgtttagcaacatgatcgacgagaacaggtcagctgcctcagcggtcaggccgaaagacgaaacagcaggaggctgaatgcattgccctatcgccgttccttcagcgatcggctgtaccagggcctggacgaccccgaccagcacgtcaagaagaatacgctcatggtgctcacgcacctcatcctcaacggcatgatcaaggtcaagggccagctgggcgagatggccaagtgcatcgaggacccagaccaacggatcagcgacctcgcccggctcttcttcaaggagctctcgaccaaagagaacgcgctctacaacaacctccaagatgtcatcagccacctctcggtcggtgctcatgcggtcgacgaagagacgttcgagaagacgatgcgctacattttcacttttatcgagaaggtccgtccctggtatgtccagcatcgggtgctctgcgagtgctgacgtcctggcgacccccctccctctgccaccggctcgcaggagaagcaggccgagtcgatcatcgagaagctttgccagcgcttccggctggcgacagaggagcgccagtggcgcgacattgccttctgcctctcgctcctgccgtataagtcggagcggtcaatgaaaaagctcatcgaggggtgcgttccaaggctcgaagcgccctcgcgccgaccgaccgtgattgctgactatctcgcctggccccgcagactgcccttctaccaggacaagctctacgaggagaaggtctttaagcgttttgctgagatcctctccaaggcgcggagcaacaagcaggccaacaagcccgacgcagagctcaacgagttcgagacagtgcgttcgttcgcagtccctcctggcagtctctctgctgatccgcctttccctccagatcctcgaaaaccacaagaagagcggcgaagatggccaggagctcgatgctgccgttgccaaaacggctcaggccgcgacgcgccgcaaagcggcgacgagtggcaagagggccgcgccggccaagcgtgcgagtgcgtcttgtccctttcctcgcccagcctcgccgctagaagccctgctgaagcccgtccttgctccctccagctcgcaaccgccgagcggcgcatagcgacgacgacgacgacgacgagctcgccgcaaccgtcgcctcgccacgcaagaagtcgagtgcgtcgccccatctgccgtctatttcttcaccttactgatgcccgccgtgtcaaacccctctgccagcccgcgcgaggggcaagcgggtcgtcgagagttcggacgaggacatgagcgagtgacctttgcgaccgacaccttctgcaacgtctgccctcaacgcgcatgacctatttttcttcgtctccagctctctcattacgtaccatgcgccatccctttcgcgcccttcttgcgtcgggtcggcagcttgtgggagcataatataagtgccgccggagcctccgtctgatgttgccgagggcctgcctgccggtccccgaggaatggtcagccggccgcggtggcgacagtcggcctctgatgagttgagcagtggcgccaggggagctcgaggtcgaggcctgctgaagaagctgcgagctctgctgcagggctgttggcgcaagatgagttgagcttgacaagaaatcaaagcccaggtctaggccctcgcggccgccgggactacgattccgacggtgtgggcgaagcacttccggcgaacgcagttcagcaggcgacagggctcgacggcctcccttcaagagacggcttcgaaagaaatgaggagggaaggaaacagcttggtcgccacctacggcgggcccccttcgccagcagcctcacccttcccccttgcagactggccggacgacgctcctcgaccgcaatagcaacagcatcagccctcctcctccctctgcaacccctcccgggccagaccaatgccgatactagttcccgcttctggctcgagctgccgatcaacctcacctgtcctagcgacccccagctcgcgccgagctcgccgggcgggccattcgacggccgattcgagacgaggcgacgttggcgaccttggagcgtcgacctcaacgcggcggcactcactcgagaagcggatcaacacctggcaggatggaaacaagccccctgcaggtgagtcgatactggccagctcctcgcccgacgatgcgtacctgactcgcttgccctccacgcgcctgcccctccgtcgcagcggacaagctcgtcaacaggccgacaggccgcggtacccgtgcaaactcgttcctgcgtcggtcgccagagcccggacctgtcccgccgtcgctaaagaagtcggcgtatctccgcgcaaacgagtcgccgtttgcgaggcgtgcccgtctcgacagcatcgggtgcttgagatcaggcccgcctgctgtccttccggccgcagatggcgatcggcctggcctcgcctcggttcaagatgcagaactttccatcgccagcgtccctctcttcctgtaccttccgagtgcaaggccgagtcttccctcgatttgtctccgcacgccgagtcttttatcgcagggcagcgcttcgtcgaccggcgagggcgactcggaagactcaagtctccctcagactccatctgcgaccggagacgcgccagacctggtcgacctcggcgaaggcttcccttggcggccgacctgcccaccgctgtccagtgccggctcggtccaagcgcccggcaagccgaccgtcttcgccctcgccctctctgccggttccatctcgatggaccgcatcgaggagccctcggtccaaatccgcctcagcagcgtcacctgacgacgatcgacccaaggccgaccgatctccttcgttccctccttctatcactccttacgaccttcacgacttgagcgacgtctccttttcatctttggctttctcacaacgcaccggcacacacgatttctccttcggcctcctttgtcatctcgtatgtccttccccgtcgtcccttgcgtcccctgcatttcagccgtcgtccttcgtagaggcgcggccctctccgcgctgcgggcctgcaacgagcagaggcggcttaaaaggagttcctgatggttgacagggtacaggatcctccggccggcggaggtgcctagctaagggcgttgccggccttgatgaagatgcgcgaaatggcaccgattccagtaaggtaagcgaccgaccgcagattggcgagcttgccgtccgagatgtagatgtagcagaggttgtagacgacgcgcgaggcgaggtagatggcgacgaacgagttgagcgtgtcgaccgggaggcgggcgacgttgccggcgacctggcaggcgggcaacagagacagtcagcctggcaatgcccgcgagaaaacggcagctctgtccctcaggcaagacgcacgatggtggcagcgaagagggcgaggttctctgcagcaacgagagagaagcacggaatctcggatcagccgacgccacgctactacgacacgagctcgacagccgcgcaccgaagccattctgctgcgccgactcggcccggaggtacttggcctcagcgggcgtgtgcattgacttgtgcgcaacacgcgcaacctcctgccgaggtcgcgagttgtcccactgtgaagggcagagcgaagtaacggcgtgagctgaagctgaacgagaactgctaggcgacgagcagtccccggagggcgaagaggcggtcgttgcgagtcgaacaacgagctgcctcctgcatccccaagacgtcgatccgctctgcgtgcgcttctaccagagcttcgctgcacgatgccaacgacgagctgcttcgaatgtgcgagactaaccttttcggcgccgccgagcttggcagagtcaaagaggctgacggcgtagaagtgcggggcgatggctacacaccaggcggccgggatggcgtagaacgagtagttggacgagccgaggaacgaggtcatcttcgggagcttgtggagggctggcttgcaggagggggcggcgaggtctgggctgagctgagtgtaggggcagagaaagaggtcaagagacggaaaggagaggcgaatggtggtcgatggccagctcgtcagcggcctccgacggggtcaatgacgatgacccgggaagcaggacccgcgtactgggacagtcttctatccggccgggcggtgctcaataccgtccatctttcgctcgcaggcgactagtgagaaggcgagatgcgaaccattgtacaacagcgagcgacctagtccaacagcctgcgcgagatcgaccgaccccgctcagcccttcagcccttgcgcgtgacggtcgcctggatgaggccgctcggacttgagacgggctcaaagacctcgacccctccggcgcgaccttttccgttctcgagtccaaaggcgctgaggttgacgggcctggcgcagagccgattgaaagagaacgtcagcgtcgagcgcaagagggtgcggggaggaggggctagggcggcgcacatgtagtggacattgggcaaggagtacgagacggccttgatcggcggtgcggccttgaggatggactgggctgcaaggtagagagtagcctgtaggaagtcggtcggtcagtagcagcagtagcaaccaagtgtaggtcaatctcacctggacggacgccgagtcgtgcgtagcaaacgtctcgagcgtgaccttgcgcgccgcctggtaggtttcctcgaagccgacggcctggtcgatctcgccgaggctgtcgacgccgagcgggatgttgggcggaaggggggcggtgtagtcgcacgagaccgaggtcgagaagatgcggtcgtcgacctctgcagcggagcgattcggcatcagcggtcgtcatgacgtctgcagcgagacctcagcatgctgggcgcaccaggcagcgtcgtgttttcgtctcgccagaagccgttaaaggcgctcccagccgtcttcatgacgacgaggtccttgaagccgctcgagagcgtgcccgttggcggaccgccggcggggtccttcgagacggcgaccgagacgacgcgcttctcctcgccatcgcggaggaacgagtgggggtgagcgccgatgtcgtcgacctggacgaatgagcaaagtcagcgcactgcgcacgtccgcaggcgcaagtcgatgactaggcaaggctccgcacctcgatccgagtccatttgagtgacgtaaccttgacgtgggccttgctgatgtggtcgtaccgactggtaaagtgtaggccgaggtgcagcgcgaacagttcgggcctgcagcagcattggtgggtgagctgcgcgacccgattctcgccggcgacatgagatcctgtactcacgtgaggacatgagggctcgtctttgcaaatatgtagaccgtattcttgactgacagatgggaaagatcaggtcgtcagcagcggcttcgtgcggcagcaggctggagtcgccgcgcagcgggcctacgggctcggcattgtcgacgctcgcctcggacgcacccgtatcggtcgggacgacacgcgagttgtcggcggcggtgaaagactctgcaaagtcgccctcgagcagcgcttggacgacgtactcgacgactggcgaagccgatgtgcgacagggcgatggcaggtcagcaggttgaagctggtcaggaggtgcgcgagcgaggaccgaccctcctgcttgccgggcttgccgacctcggtcgctgggtgtcggacgacccggcagacgcggacgaggtccttgccgtagcaggccgaggtgagctcgccgagatcctcgctgtcgtcgtcgtttcggtaggaggtcatgaggaagccgagagggtcgctgtcgagggatgatcccaaagggcaaggagtggctgcagcaaggtgagatggagaagcaaagcaggtatcggcagtggtcagaggcgggctcaggagatggcggtctgcagggaagggccaggctgaggccagagatatggcggtcaaggcgataagcatcgtcgggctcggccggcgtttcacccgttcgtcggtggaggacgagcttcgccggcacgaactccttctctttgtgcctcctgtcggcgagcagcgatcgcaggtgcgcccctgccctacagctgacatcgccagcagcaaacagtagtggtggctcgacatatgtgagcctgctggtcgtcctgctcccgagcagttgctgctggccccgcccgtctggctccatctgcggggcgacgcctggcgtccagccaccctcaaacgccgccgcctcgacaccgtctgtcactcggccagcagggcatcacactgacccctataaacgcgcccataatagccctcggtcagggaggagtggcgcgctaagctcttctctgcgctgctaacaagagacgcgactgaaaagcggccatgatgctgggcccgaccttcaggcctgctccccgaacgaccacctcgacccttctccctcgaacgacacctttttcccgctcttgccaggtgagttcgatgccgactttctccacgcttgctataccgggcctggcttttgagcccgtctcagccggcggcagctcgacacccgctgaccctcctgctgccctcgcgcctgcgccccccgccagcatgttcggccctgcctctaccgccttccttcttctcgcgcccctcgccgctcgggctcaggtgacggcgactggacccaacggcgcgaccaacccttccgctcctggccttggcgcgcacaaccagacgtcggactcgcggctcgtaacgctgaacggtgtcgacgacttctgcctgtttgctcctgcagagccggactctgcgatcggcaacgttgaggccgaggtcgtcgcctggtgcacgaaggagcgcaacggcgctcgcctgatccctgacgggtacgtccggtcgaattcagagggcaactcttgatctcggcctgacgtcggcttccctctcgcccctgtcgccagggccatcacctcggcgcactttgtcaagacgccgctctacgtccagatccagggcatgggcgacctgaccaagctcaacattgctgccggcgatgaaggaggcgagctcgacccccacggcgccgagaacctcggcaacccaatcggcggcaacgtcacgtcgaacgtctcgggcgcagacgtattctacgaagagtggatgtcgttcatgtcgtacagtgcgtccgccattctcatataccggtacgccggctcctttgctgatcctccttgcgcccctccagaccagttctgccttcgcgtctgtacggccgagaacagcgacatcaccgcagcgctccagtgccaggtgcgtttctgcgctctcattggattaagccggccccctcctgatcacgccctcacaccgctgcagcacgagctcgacctgatgggctgccagttcatcatgcccggagactataccgacaactcgttcacctcgtgtgacggtgacgctgccgctggaccgggcctctaccctcagcccgacggctcgacgtcgacctttaagcagctctacaccggtaccgccgatggcgcgccctatacgattggcaactctgccaccccggccgcgcccttttcgactcctgccacctcaaactgccgttcgtctcatcctctttagctcacacagcttgacgagcccgcctgaattccctgccttttgttccttgcttcgcagagaccgtttcctccatctccaacggtgtcaccggccttgctggcgcagctgccgtcacgactgcctctggcgctgccgcctctggcgccgtttctggcagcgcaagccggtctggcctgcgtccttcgcaatcggctgcggccgtcgcggccggctcgtcggcgagcatgtctgcgacctcgaccggcggcggatcgtcgtctgccgagcctcgctggatcgtcagcaaggaactcgaggtcctcgttgctgcggcgggtgctctgttcgccggcggcgccggcatcggcgctttcatgctctgagctttacgactccccttcttcacttcacgaccctgcccatcggacacttcccattctcacccttgtagcgctggctcttccccacccctctccctcctctgatagatgtgcgagttaacgaaagcatccagatggaggtatacaagcaggcgaagcctgggcagagcggggtaacggaagcaagaccggtgtggcggagaggtatggcagaggacgagcagacaaaggcgtaaagtcgttgggcgaacggggatgggcgagctcaggcaacggcagcttgcgacagggctgccgccgggaccgtgacagagggcttcgagtagaagacgtaaagcagggctggagcagacaaaccctgaaagtcagcagtcggaagtgcgagagggttgcgacaggcgcaaacgcacagagggtgatgaggatcttcgcaaacgtcttgaagcgcagaatggtctctgactcgcggcctgcgtccttccgatgcagcagagcattgttgctagcagaggtgcccccgaccggccggctcttgcgcccgcgaaggcggcggacgacgcgtccgagccgcgcccgaatcggccttgccagtgggttgaacgtcggcgacgactcggtcttggagagtgtgattgcctcgcggtaggacgagacgcacatctccatggcctcgtgccaggtccggcccttagtccctcggcttgcacgctcgcccatcgcacgccgacgaggctcatcgacgagcaacagggcgagaatctcggcgtagtcgcgtgacgccttgaggaagaacgtcgagcgggtcgacttgagcgccatcggccagtcacgtgcgccctgaggcagaggtagtagcgtgccagtcgagctggagacgagatcccgcgttccttcggcatcgagcccggccacaggaagcccagaggcgagcgcctcgagcacgacttgacctgcgacgcgcacacaagggggcatgtcagcgaaagagaggcagtctcgtgacaactcgattcaagcaggaatgcaccaaaagtttcggtgaagctcgggaacgcgaataggtctgcgctcgcgtagcactcggcgagatcgctgccagtctggtggcccataaagacggcgtcgatgccgttctgcccgcagaaggcctcgagttcgagcctggccggtccgtcgccgacaaagacgagcaccggcacgggggtcgacggaggcagaaggctcggcagatggacgaaggcatgcagtagcagcatcaagttcttctcccacgagctgtgcggtcggtcaaggataaacatcgtcagctactgctcctgaggacaggggcgggcatccttgcttacactcggccgacgtagaggacagcaagccgcgagtccgtgacggataagcctacgctagggctcgcgtcggccgcgccgaactcagggctcattggcggcgtgacgagcccgccgacgaccagaggcgacttcgagccgagcatcatgctcgactgcgtcgtcttggcgaagacaggcagctcgaccgtttcgatgccccatcgacgccgaagcgatgcgcttctccgcgccgggttgaagtgcgtgaggtcgacgccgcgcgaccagggccgcgagtgagggagggcgtgcgatgcgagcatgtcttgcgtcgactgagacgggcagaggtagagcttgcacctgcggcgaaggaagtatgagcggcaggcaggcacaaccagcttgtggccttaaatcaacatgcgcgaggcggatcgtgagacgcactttgagtacaaccagcgctgccacacccagatgacgggttccagccagggcaggccgaacagagtcgcgtacgtggcgaggttgctaaagaggaaagaggcagacgaggggtcagcgccgagccgaccaggccatcactcgttcagagagctctcggacgtacgtgtgatagctcgcaacgactgcgccgcgcacaccgccgccgatgcccggccctttggcgccgacccatttctcgcccgcccagccaagctcgatgcccatgagcgtctgaccgcccagccagatctggtttgccgagcagccattcgtcagcgacggtcttgggaagcattgaagactggcgagcagactcactgggtcgacgaggtggatgacgtccgggtcctgagagcagcgataccggtcagacctgaccaggccgcgccagaatgtggcaatcagactcacaaagtcatcaatctctcgcataaactttggccgaaggaagttaagcttgagtccggggtagatgactagggggacgccgagcgtgccgacgagcgggtgcgaggcgtagtgcgactgccgcaacatgttcggtctcgtcagatgaagcgccacagtcgttgcaggggtgaggagggtcgcttaccatgccagtctctgggccgcagaggatagcttcgtgaccttcgctctcgagatgctcgagcagccgcgccagcgtccgggtcacgccgtcgaccttgggcaggaagttctctgcacatccgcaagacgcagctctcagtcagcaaagactcgtgagcaacgctcaggaaggagcgaggacggaccagtgacgatggcgacccgcagcttggcctgccctcccatgcccttctcacgtcggaggtcgacctcgtcttcctcgaccattgggagcgagcgcggccgagccctcgccgctgcgagctgagcgaactcatcctcgtcgtcgtcgtagtcatcgccgccgtcctcgcccgagagctcgtcgtcatcctcgtcgagcgtaaaggtctcgatgctgtcaagactcagcaaggacgccgaccggcggacgactcggtgacggccggcgccgacgttggctgctggcgagcaaggcggtgtggcaggcccgacggccgaggaggtgaagagggtgaatgggctagccatcgtgagaggagcctgctggctagcagagtgttgactggggtcgaccgagggcgaaatgctcgaagtgtcggcaaggagggacaggggtgggtggggctcgcggccgctgcgcgatagcggtcgtgaagggcagggtgggtccgctcgagctgtcggttctgcgtcctccttgggtcgggaagcgagtcgcgggtggacctgaagaaggcttctagtaggaacggctctaagagggagtctgatggaggggtctgttgaagatcgtgtgtgccggaggctagagtcggaggtcgggaggtcgaacgtttcggctcgccgccgccttctccgccggcacacatgtctgcgccgccgaccttcgcgggctcactctcgctcgctcgctcagactggctaagctgaacggtcattgcaagatttcaggttccagagggtccgggggtgcgtacaaagtgggatgatggcgctaggggtggacgacaatgcaagggcagtgctgggtatcgagagccagggtgcaagttgcgagggtcggagagagagagggaaggagatgtgctaacaaggacgtgggaggaggtgcaagcaagagagagagagaaagagagaaagtgcaatgaggatgtacgtgtacaacgagacaaaaggacagatatcttgtccttttttttccggtgggtggtgaagacgagggacgaggaggagaaggggataggagggacagggccggcttgccgcctctagatctcgaggtggcactcgccccgggcgagctcgcggacctttgcgttgtacgccctggcctgcgaagcgacctggcccagcatgccgaccatctcctcattgccctcggagaatgacgtctccatgaactcgacgccgttgtcggccgcccaggccttgacgcgcttcgtcgcccgacggaggttcggccggggcatccgcggcagaaggtggtgcgtgacctggttctcgaggccgccgtggacccactgcaatacagagggaggagagacgtcagtcaggcggatgatcaggttggagggcagcgagacgggacgcacgctgatccagtcagcgcaggcgacgtcctgcgtcgtgcgcagctggcggacgacaaacgactcgtacatgcccttgtcctcgtcgctgacggccgagtgcgaaaggacaatctggacgtggatggccgagagcgtgcagagccagaggagaacgaagccgacggcgttgatgaggccgtcgaggcccgagcccatgctcttgagcagcgggatgaaccagcaccagtaggcgacgatgccaacgacctcaaacgtccggaagttgtcggccttggccttgaaggcgaggtagtagtatctacgaggaaggaggatgatcagtcgagctgcttgcgcagatcagagtgaagaggggcgactcacgacttgccaacgaggctaaagcgggcaaagaccatgaccgggtagaagtaaatgtgctggtaggggacgagccaggcggcaaaggcgtcgtaggggatgacgcaggcgtggaaggtcgaaaagagcgactggaacgagcgcgacgtaaaggcaaagaaggcgaggagctgaatgtcggggtcgtgaacggggtcgttgcagagcgagtgatggacgtcgtgttgctgcgagcgaccgaggagagcaggaggtcagagtcgggccgggctgcgaggaatgcaaagggcacagcggctcaccgagttccaccagccgagcgagaggccagagcagaagctggcgaggaagccgccgatggcgtggtcgaccgcgcgttttccagtcaggttgttgtggccgcagtcatgagctagagagcggcgtcaacaagggtgatcagcagcagctaaagttggtggagctcaagggcgaagaagtaaacaagagcgtgacgcaccgacaaacatggccgagtgcatggcgagcccaagcgagacggccgagacggcgaggtgccctgtgagaacgaagacgggtgtcagtcgcacgatcaagacaacggtgagggcggtgccgacgtacaacgctgggtcgcataataccacgagaagaagaacgagagcgtaaaggccgtgatacgagcgatcgtcgtcgcataaagccggagcgggtcgttgacaaagaggtcgtcctcggcgagcagctcgtgccggagcttgcggaacgagagcgagagctggtgctgcctgagcgggtcgacgtcggccggcggggcggggggctcgagcgcctggcgcgagagggccgggagcatcatggttggcgccggccggtcggtcgggtagccgtccttctcgagctgctcgagcgcagcgagcgttgtgtcgattgaaggcaccttctcgtactcagccgggtcggccgtccagccaaggtggaagggcgggacaaatggcgtccagccggtcgaggtcgggtcggtgtcggccttccagtcggcaacatcgactttggcgcagacgaagtgccgcatctgtcggatggccgcgagcgggtggttggcctcaatctcgtcggtcgcgtctcggccgataaagtggaggatgaccaggacaccgccggggtgctgacggctggcaaaagccaagagaaggaggacaagggcggaagctaaaagtcagctcgaagagcctcgagctctcgaacgacagccaacgaagcacgtacagccagcggttcatccggtagacgaggccgcggtgcatgatgagcaggtggccctgcgaaacgaggccaccaatctgcttgcgggtgagggtccggagcgagcggtcgggtgtgatgagggcgagcgggtcgaggagcgatggcgccggcttctcaactaccggcaggagcgcagtcgacggcgccgcagaggtaagggggcagaccatggctaaggtcggatcggagggagggagaaggaggcggggatagggaggggacggagagcccctgggcgaaaagaaggaaggcgagggcgagggaggaagctgtttgtccggagctgggccggaggtcagtcgcgtttggctgggctggtgctgcgcgtgagggctgcttggcggaaggcccgaggggagatggcgtttgctggcttcggtaaggggagaacgagcggcgacggcgaggcaagggaaaggtgggtggttggaggagagaagaaggtctgcaaagaaggggagaggcaaaagcccagcagaggggaggaatggccggttagagagagttggccgcccgagcggccgcggagcgaggcccacgcctgtcgccttgctcgctctcgcttgagcctccagcgtgaaggggggcgactcaaacaaagcccaggctgcgggggcagtgcctcctccgttgcaacgagacgtggggttaaggaatcgatcgatgaaaggccggggcaaggggcgcggtggccggcccggccggcgcaagggagcgagcgcagagaggccgcggcgccgtgacaggcggccagtctgaaacgccttgagaggcggtcgagaggccttggcgacgcagcgagcgagcgccgacggcggctcgggcagccgcctgcatcgcccgtagacggccagtcttgggctctatcgctaccggtcggctgtgggcaggcgatgccggcgagcgcgagctgcaggaccggcggcgggacgacccaagggcggccgacgttgctcggccacctgtttggcaagccggcggtcgctgcgcccgcgtcgagcgagcgtggttcgacaaggtgagcagcccagcaaggggctggtcaacgagcaggcgagtagaaaagaaggaggagcgaggggtcgtggttgggagcgagggcgaaggtgctttgcggtgaaagagcgcccgcagagggtcgagagtgagccagggccacgtcagctcgcaagccggctggctggctcagtcatgctggctcgcccttcttcgattctcgcccgagccggccgccgggcctccacatccgtcatcctctcctcctgctacggcgtcgggccagcggctccgtcgcgttgtcgaggcaagacgcgtcgaggggcgcaaggattcgatacaggacttgagagcatacaggtcggttcgcggcagccaggcagagcggcagcggcgacgggcgtcaggggcaggtgcgacaagggcaaacgacatgcgcagcacagccgaggtcgaggatgggaacgtcgggcagaggctcggtcgggcctcagctcgagatgaccatcagctcgccgacccacttgcgttcgatgagctcctttgcaagccaggccgccgcgtctgcgcggtagagagtgacgccgactgcaaaggtgcggtgcgcaagggcgatcagccggatgtgtcgcaacaaagagtccttcgcttcatagacacgcaccggttccgtcgccgatgtagcccgacttggccacgaccggcggcgacgactcgccccgcgtgaggaggacaccgacccggaagctagtaagagggagggggagctggttagggttgggccgcgattcaagtgcgaacgaggcggccgcacatggtccactcggcatcgatggccttggacccgtccatgatctcatggtcccagcgcttgacgtccgagtaagctgccgcgtggcaaaatgtcaccagtatcagcaaggcacgtcgcagtgtagagcgtcttgaacgaggacgcaccggtcggcgagccgatcatgatcgccgtctcggccgcccgcgccgtcagcgaaaagtggtctttcgcatcattgtgctgcgagagcgtgccaagcgcaatcatcctcggcgccttgaaggtgccctgcgactcgtccttgaacgtcttgagcgtctgatagaggagggcgtagaagcacgcgatgggctggccggacgggtgcggcgggtagaggcgtgacgatgggccgaggcacgagactgcgaagagcggccagaacccgacgtcagcgtgtcacactagctgaacctcgctgcagggacgcacggatcgcatcgaacggtcgctgctccctctcgaaaagggcgcggatcttgtcggcctcgtcgagcgtgcccgcgacgagctcaatccagtcgcggtaggcctcggggatcttgtcgggcgaacggacataggcgacgagcgtatggccggcctggtgcaggagtgggagcacgagcacgcccagcgacgaagtgaagccgagcaggaggaggtgcatcgtcgtcggtgggctgcgcacggaagcttcgccagtcagccccctccgagcagctcgtagccaaccgagacctacatctagggccgcgcttgaacacacctatcgatgtacgagccggatcagcagcgacgagatggtccttggcgggggggcgacgaggtctcgatgccaccgccgccgccgcttgagccgatgccgctgcgctgcgcgcaagagcttcgcgagcaggcgccaaagagaacaagcctgcctttagaccgcaacccaccagcatccatccttcccttctcgccatccacttggccaggcagcatgttgtcacgcggtcgatcttcctcgcccaagccgctcgctcgccagccgtcgctcgagcgcgacgacgccggaggccagcagccccggctctgcatccttgccaacctcacgccgagtgcgtcccgggctccctttgactgtctctggctcattggatccgctcgctgacggtctcgccccttcgcctcgaatcagacgtccagaagccacatctcgaggccatcttctcggcctatggcgaaatttccggcatcgacctgccgctgttccgcgtgagcggccagaaccgaggcaaagccgcgctcgagtacaggacgcatgcggcggcgctgctcgccaagcggtcgatggacggcggccagctcgacggatcggtcctcgaaatcgtcctctcggacctgccgctgcctgagcggtcgccatcgcctccgcccgtccggcgccggagcccgctccctcctcctccgcggaggagatcgcagagcccgcttggtgtccggaggaaccgtcgaagcctatcgcccccttaccgccgcgggtttgagcagcagccggtccggggagggtggggtacgggtcgtggtggccgtgacgtgcggcctgttgcgccgtcctacggtggccggccggcgggcaggaggagcccgagcccacgacctagaggttggcccctgagccgcagcaggagcccagtcggtcggaggtgcgttgctcctctctgtgcctccggtcgctattcatcgcgtccgtcgactgaccttggaagcttcatccatgttccccaactcgcgctcacgcagccggaacaggccccgcagcttttcgcgctcgccagtgcgcaggcgtcggtgcgtgcttcccgttacttaagcctgcttcaaacgcctctcgctgactgggcgcttgatgctgtccttgcagatcctactcgcggtcggactcgcgctcgcctcgcccgcgccggtcgttctcgcgctcggtcagcccagcccggcgcgcacggagcatgagcaaacacagcgaccggtcgatgcgctccctctcgcgctcgcgctcgcctgtccgtcggcggtcgttctcgcggagtcccgctcggagggcctgaggggatgccactggagtggccgcactctgtggccatgatgcatgtcgatcgcagacaaagacgaccggcgagcctatctcgcgcgtctgtacgcatcgtcatcagagagagaaagcagtcatgtcagagaagttatcgtgtgcacgtcgactcgacacgacgacgcccgcgccggctaatcggccccgcgcgtgagccggcccgcagcgcttgcgacctcgacaccgacgtcgaccttcaacagcgtctctgttcccctgtccaacgccctcgtcctctgtgatcccgcctaggatccagcatccggccagagcgagctctctccaacagctctcgcggccccatgtcgctcttctttcacgtgccagacccgtcggcttcggccggcccttcaaccgctcctccgacgctcgactcggtcgtcctcctccccttgacgcgaaggtcgtacgcctttgcccagagctcgcctgaccggctcgtcgagctcctgagctcgcagccggccgcggtcgtccggaccggggatgtcctctcgctgagctcagattggacggccgaggactctcgccagcagctgcagcttgggtcggacgagggcggcgaggtccgcgcttggcgagtcatcatgaccgagcccgtcttgtcgggcatcttcgtcgcgccgcaggccgaggacggcgtcgaggaggctgacgacgacgagggaggttcccggccgacccaactcatggtcgctccttggctgccaaggagcggacccgacggcgacgcgcctgagccagagctcgaccatctcgcccgctcgacgtcgtccctttcgcaacgctccgactcgtcgtcagcctcgtcgcagcggacggtgaagccgatcctctcgccgcctccaacgccgccgccagaggtcgaggatggcctattcgaaggggagctcgacgacgacgacgacgacgacgacgacatcgacgactttgagatcacctcatccttcctccagtcggccttgctctcgtcgagcacggcagctctccctcccggctcgctttccggaagcaaccttgcagagtcgacggcctcgctcgcgtcgtcgcaaggtagtgccagcctccggccgcctcagctcggacggcccttcccagtcggggcgctggcgacgcgcgtaggcagcggctcgccagatgaggacgagtcgacagcgtgggttcgaacacgtgtacttggcgaggtcggctgcttcgatggcgactgggtgcgtcacgtctcacagctcgcttgtcactcggcccttgacacgaacccccccccccccttttgaccagctcgccgtcaaggccgtctcgtcagatgaggccgacgacccgttcggcgactggcggatcgtccgcgtccgcgccctcgagaattcgagggaccatctgcatcccgtcaacctgccgcccttgatcctccacaatctgttacccccggcggcctccccgtcggtcggttcgacgccaagcttgagccttgtcccaacctcgttcccgccgtcgacccctccaccgctgccgaccgccgtgtctgtcacgctcgaacgactcgcatctccggcaagcacgagcaagctcctgcagaaggaggtcgttggccggctgcgggcctactttgagcgccccgggtcgggccggcgtgtgctcaaggtcggcgacctgatcggcctcgccgtcgatgagaacgccgtcgacgacgcggaggaggatggaagcgcaccctcaccaaccaggtgagtacggcgcatcttctcattctgtcagccgtcgttgaccggatctctcctcctgcatgctcgtagagagctgtcgcaaccgacgacgcccgtcttcttccgcgtcttacatctgaggcagtcgaagcccgaggcagccaaatcggtagcgctcccggcctctgagtcgtgggaggcgcgcgccctccgtggcgactttggctgcatcatcgacccggacgagacgatgatcgtccaggccgggtctggcaaggggctcagcgtaggggggcctttcgtcgactggctaggtctcggtcagtcatatgaccgatctctcagaatgttggtgacgttgacaccctccgccattctactcctctgccaggccccttcctgccccttccgccccatccggccgctccggccacgctcaagagcctccaccagattgtggcttcggctcttcagccttcgatggcctcgttcgggctccagctctcgatcgtactaaagggcgctcgagggtgcggtaagcggacaatagtccgcagtctggccgctcggctggggctcggggtgctcgaggtgcgtcggctacgactgcaaccatcaactagcagcgctggcgttgacgacgcgatggcgaccacaggtcaactgcttcgacgtcgtcggcgagacggatgccaagaccgagggcgtcctccgcgcgcgcttcgaacgggcagcgaccagctcgccttgcatccttctcctccggcacatcgaggcgctcggacgcaagggccaggctcaagaaacgggcaaaggtaggtcccgactgacgagaccatttcccaactctagactgtcggcctgacgttcttgtttcgattcgcgcgcgacagagcctccgatggctgccgtcctcaaggactgtatcgattctctagcagagacgtggaagtcgtccgcctggccagtcatcgtcgtcggtaccaccggcgacgctgacaaggttccggccgccattctcggcaccttcaaagaggactttgtcatctcggttcgtccccttgcgaccttcatgtgaaggcgaccatcgctgacgctcggcaaccccctgcaggccccggacgagcgcgaacgtttgcggatcctcgagacaatcctcaccggcgtcaacatctcggccgacgtcgatctgggcgctctggcggtcgagacggcggcgcttgtggcccaagaccttgtgtccctcgtccgtggcgtgcgcaatgccgccctgcaacgagtgatactgcgacggtgcggactatcgctcttgatcttgcgcctttagcatgctgctgacaagcagctatttctcttgcagctcgacgccgctgaccgattttgctgtcgccggcctgcctctgacctcggccgactttgcacacgccctcgaggcagctcgatcgtcctactcagagagcatcggcgcgcccaaaattcccaatgtctcctgggacgacgtcggcggcctcgccagcgtcaagcgtgagatcctggacacggtcgagctgccgctgatgaggccagagttgttcgcgagcggcctcaagaagcggtcaggtacgtcgcaaatcgtctcacgcgttgcgctgagtccaagctgaccgccgcctccatcaccctcaggcattctgctctatggccctcctggcaccggaaagacgctgcttgccaaggcggtacgtccagtgctgcattacacgtctctaacgtctgagcttactgttctcgccgtcttgcccaggtcgccacctcgtgctcgctcaacttcttctctgtcaagggaccggaactgctcaacatgtacatcggcgagtcagaggccaacgtccggcgtgtctttcagcgtgcccgggacgcaaagccttgcgtcatcttctttgacgagctcgacagtgtcgcgccaaagcgcggcaaccagggcgactcgggcggagtgatggaccggatcgtcagtcagctcctcgccgagctcgatggcatggccggcggcgacggctcaggtgatgtcttcgtcatcggcgcgaccaaccggcctgatctgctcgacccggcactcctgcgaccgggcaggtacgtctgtcagcagattctacgcctggctgtcgatgagcgactgacgctagcttctccccctcgcagattcgatcgcatgctctatctcggcgtcagcgacacacacgacgcgcagctcaagattatcgaggccctgacgcgcaagttcaagcttgacccggccctccggctcgagcagatcgctgcccggtgcccgttcaactacactggcgccgacttttacgcgctctgctcggacgcgatgctcaaggccatgacgcgcaaggccgaggagattgatctcgccatcggtgagtcctggtcaacgggcaaaacgtcggagtcgagcgccgctaatgccaccttgcccggctgggcgcagccgagatcaacgcccggccaccgccagcgaccaagtcgccccatccgcacccgatgaccccgcagtactatctctcggagctcgcccggccagccgaggtcgaggtcctcgtctcgcaggccgactttgcgctcgcgctcgccgagctcaacccgtccgtcagcgagggcgagatggcgcactacgcccaggtccagaagcagtttcagggtccctcttcggccccggctgctggtggagcgcagaggatcgagcagcaggaggcgccgccgcagacaaacggcgtcctccaggacgcacaggagcgcccgaagggcaagggcaaaggcaaagcccgagcctgatattgccatgatttggcaagggcatcaccaggcggagatcgtatgagggttacattagagagagagagggggttgtcttcgagccctccatttggcatctacgaccgcgccgccaacgtttctcacgcgtcttcgtcgacgatctcctcgatgcgggagccgccagccttggcctgctgaacgagcccctcggcgctgccagccgcagacccgagcgcagatgagacggcggacgaggtcttctcctttttcgagcccttctcgcccgtcttctttgccttcttgcccttcttggcggggacgtcccaggcccagagagggatccacgagtcgacctggcaagtgacgagcgagtttgcgtcgcgtcagcggaagtctaccggaaggtgtcgagcggaaagggggtgggcgcacaaagctgacgtcttcgaaaagccgagggaagacccagatgcccgggctggcgacgacgagcgtaatgacgtagaagatgagccggaggatggccatcgcaaagaaggcgccgagcaggccgaggacgcccatcgagagataccagacgccgagtcggagcgtgtatggccagagcgggaacatgacgccggcgagcatgatgatgacctgcgcgcgcaaaggggaccttgcttcagtccgacgtcgcaagatttgagctggaggagacagacgcaccatgcccacgccgccgacataggtccagaactggctgccctcgtagaaccacgcgtagtagtcaagtccctcgaccgggaacgcctgctgagggttgatctggagcgtccggggcgagccctcgggcgagcgctggacgcgcaggtagaaggcgctggagcgggcggggttggcgaagaggttggagggttctggagtcagcaatagcactctgcatctgtcaaggggaaagtgtgtgtcgtaccaggggatgatcgagtgcaagagccgggccgcctcctcctcgtcggcgacctgcgggcacttcttctgcttcttgtaagcctcagagaggaggaccttgatcgccgtcttgcctgcgagcgcaacggtgacaggctacatcagttcaaggtcggcctggatgagctgcagcacgcgtcgcctcggtcgtcggagtcgttgacgcgcgaagagcaccccagcgaccgcggagctacgagtctcacgcacccttgaagtaatcggtccgcttgccgtttagcaggccgttgcggaccttggggccattcttaccgcggaggtagttaacgagcgcgcgctgctcgggcgtggcctgaaaagcgacaggtcgaggataggaaatggggtcagctcgcgagccgcggacggaggtgtgctggcagacaggcgcgagcagggcggaggcgtacgaacggctttcctgtgagttccgtcagagcagcgtgtcagcggatgcgtcggcaggacgacagagtcaaatacgacggcgcacgcactgctgagcttccatcgtcgagagaagaagaggcagacgaaagagggaggatgagcgtgatggaggtcggcggccagcggaggcgcgtgctcgacttgcgccaaaggtccgcgctggcatgcgcctccgctacttgacgcagactggccgttcttccggccgctaagcacgacagcaacgagcagaaaaagccagtcactccagcagtcgacacgacgagcgggcaaacgagactagcatctatctccaaatcctccgaggtgaactcgccaaccgagatcgtcctctccctcagcctatgacagcggcgtttcgtctgagcggcgcgcccctcagaaaaggccctcgaagccagtctgcttgggcttcgccaggccgaagacctcgctgacgagcggcgcagcctggcgcttcggcaggtagtcggccaggacgctgtcgaacgacgcagcagcagaggcagctggtgcggctgaccgagcggtggacgaggcgacgagcccggcaaggacagcacgccggagcgaaagggcgtcttgtggcggcggcggagccttcttctcgcccgccggcttcgatccgccggggatctgcaggaacgtataggaagggtcgaccgtcagcaaggggtcttgttcaacggagaagcaacttggtagcgattcgcaggacgcacagcaaaccgctccatgacgccgcgcttgccggcctgctcgagcgcctccgactccttcgagccccagacggtcggcaccttgcccatcgccttcagcacatcgccctttgtcaggtagccggcccggccgctgcccttgagcttagcgacgacctcgggcgcgagcgatgaggtcgagagcaggcgcgagaccgagggcgcaagaggcttcgagtgcgtgtactgcgtgtggccgccgtggctgctcggcgcggccggtgccggctctgactccttcggcgccgaagaggatgaggacgatgccgacgatgacgacgcctcagcgggcttctcggacgacgacgacgacgacgaagacgactcggcgggcgcatcgctgccctcctgcgcgctgaactggtcggccgagagcgaggccgtgtcgtcgccctcctcgacgaggatgccaatcagctcgccgacctggatgcccttggcaccgtcctgcttctgctcgagcgcagcggagggacagtcaaggaggcggtcagccgggcggtcatgagaagtcagagatggaagcgcatatgggagacgcacgaggatcttgccgaggacgccgtcctcctgcgtctcgacgtcgatcgtcgccttgtcggtctcctgcaagttcgaaagatcatccaaaggggccgtgattagcgtccgtcatcgtcgcagctgtcaagctggccggtcggagcatgctgagagagggacgcacgatctcgagcagcacgtcgccggcggaaaaggcctcgccctccttgatcttccactcagcaatgccgccctcggtcatcgtcggggacctatgcaggtagaggcgcgttatcgtcgtcagtgaccatgcgagctggccgggcaagccgctcaggtcgagggcgaaggtcggcgacccgcgccgcccgaccagctttgggggagggtgcggactgacatggctgggaagcggaaggctagagtgggtggcacaagcgggttagcacatgagcagaagattgcagattgagagcagacgaaggaggcaactcacgcgtggcggcctgctggagggccgacgagtgcaggcctaaggcgcacgggccggacgaacgaggtcggaaggggagctgtcagcgccggcggctcgacgagcgacaggccggccgaaggctggatcacgcaccgcgggcgcccttgacgaccgagcggagaagagcagtagaccggacagacatgcgaaggaagagagaaagatgggaggtctggaggaggagtgctggtcggggagagcagcagcaggctcgcccccaacgccgcccagcaagccagcaggcagcgcgacgcggaggagtgccgcaagtcgcctgccgacgacctccttgacccagccgacccgttacggagcacccgctacaaggcatggccacgcctgattcggtcggcgacgatggcagcagctcaaaagagtcagtcctgccgctatggctgggagaccgcgttcaaggaggggctttcgtcgcgaccccctttgttgaccccgcagccggctgatgcctcgtgcccggtctgctcacctttcgctcggtactgcagctcctcaagtatcgagtccgagctcagtcgcctccgccagcggtgcgaagagctcgagcgggacaatgaggacctcgccgagagcaatggtctgtcgcccactctgcccccgcaccgcgagcgtctgcgacgcccagctgacacgctcgagtctgcctgcccgcgactgtgccttgcctaaacagtccagttgatgaccgagatcgagacagatcatgacgcctttgctggcgagcggatcattctcgaggagaagatcgtccggctcgagcgtgagaaggaccattggcaggtacgtccgcagcggcgctctcacgggccggctgatgaccgcgctcacgacaaaacacctcgctctcacgcagagcaagtacctcgacgcccagaaaacgcaaaacctcgagattgggacgctccagcgcgagctggacgaggttgtcagtccagccaagtcgcgccagggttccacaaccgcagcgactgaccgagcttgcgatgcgtcgcctctggccgagcagaaggccgaaaaggagcgctacagggtctcgctgcgtgacacagagatgggcgtcgacgacctcgagcgtagcgaacggtcagtctcagtcggttctggtcatctgtcagccgtctatctcgcgcgggccagtgctgacctctgtcaaacctctggcgcgcgaccccagcatgaaggcgagcgagctcgccgatgagaaggcgcggtacaaccaggcgatcgaggacaagacgatgctcgaacaggagctcattggcaagatccaggtcgaggaggagctccagcgtttgaaggacgagctcaacggtcagtgcgccgaacgcatgccatcccgtcgtcggaggctgatcagctcagcgtcactgactccttctcagacatctatatcgaggtctccgtcctcaagcagaagctcgacagagctcctccgtcgccgactcgatccatcacgcccccgccagtgctgccctcacgcgcgccaacctcccgagcaccaccgcttcagcgccagtcgtcggccgaccgggcggctcagcagccgcagatgagccctgtaaaggagtcgtcaagggagctgtcgatctcggatctgacattccttggcgacacgccgaacggcgtgctcaactcgtcccccttcgctgctcaacatcgcaacgaggacgacgacgtaagcgacgacggcctgtcaccttcgccatccatggccggtctgcctcctcttcattcgcctcctccaccactggtacgaggacctgcttcacccctgccgcggtcgacctcgtcgcccgtatttgctcggctcggcgcacccatctcgtcatcgcgcgcgactcctctgcctgggtcaccgtctgcgctccctcggtcgatgaccggacgtaatttgaacgggcccctctctcgggcggcccctgcctcgccacgctcacctgccgtcgttcgtcctcgccagccgatgccagcacgcacactcgcagcagcagcagcaccgtccacaaagtcgcgcggcgtgcgcatggtctctgaccttggcgagcgcgtgcggacgcttcagcacaggatgggaacgcaccgcggtccagttgccgtcgccgctcggcgccatgcgccgctgccgccgacgccggaccggacagcctcgtcgagtcgagcctcgtcccgcacgtcatcctcgctgagggacgccgcttctgacgcccgaccgccgccggccaacgcacgcatgcgcgcgctgacagcagatgatcagccgcgagcgagcggcagcaatgggccgctgacgcctgggacgcccgggacgcctggcacgggcgactgggtgatggtctcggacgccgagaactcgccgacaccagcaccgacgaacaatcggccgccgtcgccgcagccgccaccgaggccgcgttcgtcacttgctggcggcctcaggctctcgactcgttcgtcggcaaaggcctcgtcatccaccctgccaacagcgacgctgccgtcaaggcccgggatcccctctccgctggcatcatcggccactcgctcggagctgcagcagccgacccggcggccctcctccagattcggcgagcaccgaccgtcatcatcgctgggccagaaccctccgccacggcctatcacgccgtcctctctccctgtccctcggaggtcgctctcgagctcgcgaccggcgagtcctgccccaggctcgtcatcaatcaccttcccatccacctctttcgccggctcgtcggctgtggatcggtcatccatctcccgcccgcggccgctcgggagcagtacgcgtgcagcccaaccagtctcgacctttggctcgacttcgggcccgccttcgagcgacgtcgtcgcgtccgcgctcaagcgatcatctcgccggacgtcgcttgtcgactcagccgtcccttcgccgcctccagccgcgccagtaacgtcttcactctcctcaacacactaccggatcccgacgccgcgatcctcactcggtacctcctcttcctcacgctctcggcctgtctcgatgcccgtccagccgcgggatgcccctcctgtacccatcgtgccgagccatctggccggcaagcggcacgccatcatcctcccgcccggctcgcggccggctctcggtcgcaaacggagctcgaccggcgggtctgacggcgcactcctcggcggctaccaaccctgatcggcatgtctttgttcttgttctttgcgcgagacggcaagtcttttacgggacagcatcggattcgaggggacagagggcacaacagacggacggaggcgaggtggcaaaaagtagcgcgatgcgaggtttgttcgaggcgggcgggaaggaagcaaagacggacgacagagcgaaggacagaggggcagtgtacggcgagtgtgggttgacgagcagagggttgtcagatcgggcgcgagtcgccgaggaacgatctactgggaggtctgatcggcggcactgctcgagctggcggcgccctggccgagcccgaccagaggcgcatccttgaccgcatccgggctggtcgatgacgtgttagcgccgctctgggcctcgtccgatgagtcggccggcttagagacgccctgaaccggcatggcagacggcgacgacgggccaccgacgtcggtcagcgacgccgaggaagggttttgggctgttgccgctgccgcgccgccggtcgggggtccggggaggtcgagctccccccgagcggccgcccggacactctcggcaggcgacatgccggcgccgaagtcctcggatccgacgagaggccggcccatcgacaggctctcgagctcaggtatgggcggaaccgacccggccgcggcgaagctgccaaacgtatggcccgagacgagggcgaggccaggcgtcacaccgggcgtcaggccgccgtcccagatgaccggctccctcgccacctggtcgtcgtcgtcgtcgtcgctgtccgtccgaggcggctcgggaccgacgccaagcgcttcggccagaccctggtcgaacgccgccttgaccgacttcaggctcccccggcgcgagatgagcgactcgcgtcggctggccatgtcgaacgcctcctcggtttcgacgtcggcctcaaggtcggcaaacgaccggcagacggggcacgagaagcccgggtggtgctgctcgagtagcggccggatgcacttgtagtgaaagacgtgcgagcaaggcgcgataaagagcgactggcagatggtgaccgagaagaggcagatgcagcagtcggccgtcgaagccttaacgaccttcttgcccttgctcgcagccgggctctcgggcgcgccgccaccgagcgcctggagctgcttcagggcggccgtgctacgggtaaccgataggggagatcagccgggtgtgctgccagtaaggcgtgcggcttggggactcacttgaagttattggcgcccgtctgccagccgcggccaatctcggcccgcatcttgacacacttgtaaatctcctcggtcccgccctgatagtcgacgccgagctggaggatatcaccgtccttgatcgcaaatggccgcgactcctggccggggggcgacagtcgctggtggttgagaaaggtcccggacgacgacttggtgtcgcgcacgaagaactgccggcgtcgaggggcttttaagcgaggggcgatcaagggagaggcaagttgatagacgtacgcggcctccctcgaggacccagagctcagcgtggatccgactaacgaccttgctcttgaacgcgaccttgttgctcgtgtgcgccccgccgcgcggcacgccgtcgacgccgctctgcttgtcggtaaagcgaccgatccggagcgagtgggccggctggtcggccggcgcgccgggcagcgtcggatcgaacgtctcgggcacgtcgcggacgaccgggtcgaacggtagcgagttggaggcttcgaggagcgggacgagtcgcagccgatgaactggcgcagaggtcgaggacgacgcctcagcgttgccgacagtcgacgaggaagcaccggcgactggaaaaaaagaagacttgagacggtcagcgaccggctgatgaatgaagcatcggtcgcaggcgcggggcaggagggacggaccattgccgttctgcggtgccactgacgccctgctctcatccgacgccccgcccgcgacctgcggccgagctaccatcatcggaggcgtgctcgtgctccgcgcagccggcgtcacccctccgcccgccgacctcgagggagagatcccgccactggctgcgccagacgaggcgattgtcgggagcccgccgacgccgttgcccgagctcccgccgccctggttcgagatgcggcgcatcaggcgctggccaaagttgacgagtgggtcctccctgtgcgacgtcgagagcgggggcgagggcaggccgcccatccgttgctgctgctgctggcggcgggtcgagccggctccgaggccgggcgaggacggcccattggagccgacgagcgactcggacgagatcggctgggacggctgctggcggtcaaagtagaaggtcgggggcgagttgagcgattcgcccgtggccgctcgcggtcggcgcactgggaggcgaagagacgggtgcgcagaagagcatcgtcagcctcattgcgtctcggcctgcgccacggtagctgacgacgaggtggcatatgacctgccaggcccgatagctgccataccagctccgacgagacgacatcgaagctgaatgtctccgtcgcaatcggacaagaagaggggaaggacgggacgcactgaaggaaggcaggaagctcgagcggccgcccgggctctgcgggaggctcatcggctggccgccggccgaggtcgcggccgaggtgccggcggcgtgttggccgttggcgatctcagaggcaaagctaccggtcggcatctggattggtgagggcgccatcgcgcgcggagcgaggggcacggcgggcaggcttgggaagaggaagaggggagaggctgtgatgaccgacggggccgaggagggaggaggtgggtcgctacgaggcagcccttgaggtcggaccgatgtggagacgatgcgcgctgtcgaaaggccagctcgccgttcgcttctggcgtcttttgcctgctttgtgtcgtcgagaagaaggaagggagagaggaggaggaggaggaagacggaagctgcgcaaggaaggggggcgcgggcggaagagaagaggccccggccgcacgcgggtcggtctttcgagcagcagaaacgcctctgcggaccgagacccggcaagctggtgggcctcgaacgcttggcccctcacgtcggcctcacccatgaaagagctgggcgttttgattttgtatcggtgcagatggaagggtcgtgaggcagggaggggcaagcctatagggtcgcgcgggaagaagaaacaggagaaaaagatcgaagaggtgatgcgtgcgtgaaagaaagagggagggccgggccgcgaggtcgtgcaggtgatgagaagcgccgccgacagcgcctacgagtagcgctcgcggctgatgacccggaccttgatgccgtcgagcccggcgacatcctcgtcgtccgaatccatctcgtgtgggctcttgctccggacgaacgacgagctgctgctgcccgaagcgctgcgcgacatcttgccggccgagcgggcgattggcgagccggccgagagcgtcggcgatgagggcggcggcgcgaagccgaagggcgcgactggagagggcggctcgagcggaggtgagggcttgacctttgtcggcgtcggaggcagggacgaaggatcgacggtcggcgtcggcggcgtttgctcgaccgtcggaggagtgccgacgacgacgggcggtgatgaagagggaacgggcggcgtttgatagatcagaaaggggatagaggacgggggagtggcgggtcggacaggtggcgcgatagccgctgacgtcggcacgacgtcgggggagggcgacgaaggggacggcttggctgttggcggagctggctcagagagctctgggtcgaggtcgcagatcagcctctgccacgacggaagcgtcggaagtagtgccatggacgcaccagccttgacgtcggtctcggcgtccgtcttctcgccagccgggacggcgggcagatccttgccttcaagagggagagacgagctagatcagcgactgagttcgtcgcgctcggcaagcttccggagacgcaccctctggcgtgggcgtctgctctgcaccttccttggcttcagcggcagcggcagcggcggccgctttcttgcgcttctcgcgcgccttcttctgcgcgcgcttcttgtcgcgccggcgcttctcgcgctgctccttcgtcaggccttcgccgccgcttgccgaggaatcggtcgactcgctcgccgaggacgcggtcacaggtgtcgtcggctccgagatggccggcgagggctccgagggcaggtcggcgacctccttcgcggtcgcttcctcgacggtcggctcgccagctgtcggctcggtcgccgttgccagcctaggacgctcctcggtcacaggagccgagactgcgagagtggcgatgtgagcaaatgaggaggtcgctctgatgactcgcgcggcgaacaaggtagacgcaccttcaggctcctgcagggccttgaagtcggtgacggttgccgacttgggcgtgacgaggccaggatcgcccgtgacgtcgtcgatccggagggagtcgtcgtcgtttgccgcgagcgtccggtcggcgtcgccctcgtcctcgtcggacggcatgtcggagatggggatctcgggcgagctgaactcgagcgtcggcgtaaagtagacgctgccgtcctcctcggtcggagggacggcgagaccagcgggcgaggcggccgactcgccgttctcggccggcttggccgtcgctgacggagcaggcttcttcgccgtgtcggccgtaatgttctgcgcggcgacgtcgtcaagccagctgtcgacgccgtgctccttggcgtttgtctgggccgatgcgggaggcgtctcgatgccaacgtccgccgtagcggcgggcgtcgtcgctcgctcggcctccttggcctcgagcgcagggacatgctcggcctcctcaatctcgggctcccgcccgccagcgtcgtcgagcgagagcttggcgagcgagtcggccgcggtcgagtcgtcgaggggcagggcgaccggctcggcacgaggcgttccaggcgcgtcggccggcgagccgacgtcatcagagtcggccatggacggggcgatggattcagacacctcgaccatcatgcttccgacggggcttgccggtcggcttccgccaatgacgagggcgtcctcctcagtttcgtcggcagagggctcaatgacggaggggacgccggtctgctcagccgtcggcgggcttggctgctgtgagacgttcatcggcagatacgacgacgcggtcgagggcgcggccgagccgatgctggccatgcttgaaaggctcgtcgtgctgctcggctgggcgaggaccgagttggaccgcgagacggccgccgtcggcggcggcgcgtccgggtccgtcgccgagaggtacgacgacggcagggcgttcgtcgtcgtgtcgggcgcattgagcggcggcggcaggccgtttgtggtcgagggcgagtcggagcgcgagactgagccagacccggtcgtcgaggtcgtccgggaacggggcgtcgccgacgaccagctcgcgcccgagaggccaggcttggcctgcgaggcgctcgtcgaccgcgagccgggcgtgacgccaaagcctccgcgaccggcgctggcgagaagagcgcaggcaggagcgggcctcagtttgaatgccggcgaagagatgcgctgaacatgcaaacgcacctggggatgcggttgccaatcatctctcggctgacggtccccctgccctcgctcggcatgccgaggccctgcccaaagctacccttgggcacgagcggcgacgcgccggcaacgtcgtactttgcaatgcggctcttgagcgaaccagggacgatgggagacgtactgttgctgttgctcgtcgaggacgaggtggactgcttattgagaagcgcgaggcggtcggcgagcgacatgctagtcgacgttggcagcacggggggtgccctgcaaaacgcggagtaaagcgtcagaccaacgaggaggcaccatacacacagactcacattcttgtcgaacgaagtctctgacgaggcgcaaaggcggtcaaacgtgggcagagacgggtcgaggaggccgggagcgaaacggagcggtgggctgaacggcgggtctgtcgcgacgcgctcgtgtgatgactgcgagacggaacggtcgtcgcgtcagagtgggtcagctcgttggcccagacgcgaggagacgcaaggccaagttcagactaagcggacgtactactctgctaatcaggggtcttgagggaggggaggcgggtgagggtcaggaggcaggcttcgagagaggcgtgccgcgcccaaagcctccgccgtgcgcccgcgcaggcaggcgttgcagctcgtagtcgtgccggagagacggactggaccgctacatccatcagtgagaggagccgacctgtggtcagagcacatccgacgcagcccttagccatcgacagcagtagatttggattcggcaataggtgcgtgtctttgcgcactccgtctcgtctccggccgccagagatggctgcgcagaagaggcgacccgagctcttgagcgttgatgagaacgacgcctccgccgcaccatcttgatcgacgaaagacagagctgacgcgcccttgccttacttcgcagacggcacgatggcgcccttctcccgtttccaggtctcgccctacaagaatgcgcttccttcgccgacgccggctgcccagcatctcttccctccggcctcagcccactccgcagccgtcgcagggagtgacgactgggtgctcgtcgcctcgggctcggacgtgctggccattggctgggaggaccagggcaagagtttccagcacgagcgtcggagctggaacgccggcgtcggcgagatcgtcagcctgacggtccagcccagcgcctgggtcgccatcagcggcaagacgggggtgcacattcacaggctccctctcgcttcccgtgatttcagctgacaggtgtcttcttgctctgccggacaggtctccatctttaccttgcctgccgctccgttcgagtcgcccaagaaacttctctcgctgccggcggctgcctccgtttcggcgcacccaacgacgccatcccttgtcctggcacgtctcgcgatctactcgctcgattcggaccagccggttatgacgctcgagccctggaccggcaagggtgtatgggcaacctgctggagctgggacggcaagtttgtctgcggcgtcggcaaggacggcagtgtcggcatctgggacccgcgttcaggcacgtcggtcgcctgggtgcgtccgcgcgggtcacaccttccgcctcattcgggtttgacagctgacacgacgcctgcagaagaccagccctgtcctgaaccacctcaagccggcgaactgcactgccttcggcgccaacttccttgtcaccggcttcagcaaggcgagtggaccggcctcgcgctcaagagacgctcagcaggctaaccgcagagagccgctcttcgcatgcagagccgcgagcgcaccgtgctcgtcatagacccgctctcaactggtgcgccgattgcatcgtcgacgctggattacgagacggccgccctcctacccgtcgtcgaccaggagcgggcaatagtctacctcgccggccggggcgactcgatccttaagtactctgagttcacgaagaacgcgttcgcctggaatgcagtcggcgtcggcgctccggtcgagagcctcgccctagcgccctggaagaagctcgacgttatcaagggcgagatcaaccgactgctcgtcctcagcaagcagggcgacgtcatcccggtcccggtcatcgtaccgcagcggttctacatcgacttcaacgacgcgacgaaccctcccgttcggtccacgggtacgtctggcgtgtcttcatctgccatcctcttggtccgggctgacacgaccatatacgcgacacagatgaccggcagacggccaaggcctggctcgacggcggcgacctagtgccacgtctcgtcagccgcaatccttcgcagagggaagtacgtaaatctgctccggcagccaccgtcgaggcggccgccccgacaacccttccggccacagccaaagctccctcgctcatcaagcccatgtcagagccacaagcggtaccgtcccctccgtccgagcagctcgagaaggctacgctttcggcgcctctgaaagcttcgtcaccgagctccccctcaacgtcggctgcagagaagcctgtcgcggtgaagccgcagccagcgacgtcggcgtcatcggctccggctgcgacggcgaccaagtcgatgtcctcggatcagcctgccccagaagcggccctcgtgccgatgcagggcaagtcaaccgtcgctgctgctcctatcgcgcggtggtcgcgaaattttctctctggcaacacgcctctcatcccggctcacgacaacctcgaccacgtctcctcgtcttatccggccgagttcccgctcctgctctctacgacccgcctcctccttttccctgtctcgggctccggtggaaggattgccgtccatgaccggcgggcacgaggccggatgccgctcgtcggcgacgtcaagacgcttgaggtcgggacggagctcgtcgacattgcgctcgacccggtcgacgtcgacggcaagctcgagattgcgaccgccggcaaggacggcaaaatcaagatctggtccgtccctcaagccggcttgaccgagagcgtgcatgagccgacgagggtagttgatgctccgggtgtcgacaaggtggccaagcttgccttcagcccagcggtcaagcatctccttgccgtcgcttcgtccgactttggcgacggcgttgtacgcgtcgtcgacacgcagagcggcgcgacgctcgtcaaggaaaagatcagcgagcagggcgtacgtcgagcaacccgtcctcctctgatgcagctgcctgactgacttgcctggctcatcagctcttttccgtcgcatggaacgcatccggcaggcagctcgccgtcgcgtgcaaagaccgcaagatccgcgtcttcgacccccgatctccgtcaaagatgctctcggccctgtcacacgacagcccccgcggcgtccagctcgcctgggtcagcgacatacagctcctcagtgtcgggcactcggccggctcgatgcgccagcttcgcttctactcgatcgagggtgactgcctcaaggtcggcgggtcgctctcgctcgacgtctcgccggcggtccttttcccgcactacgaccccgacacgtcgatcctctggctgtggtgcaagggctcgtcgaccgtcctctcgttcgacgtccacccagagaacgagcgacagccgtttgcccagcttccgcccttcactggcggctcgcttcagaacgggctggcctttctgcccaaaacggacgtcgacgtcaaggcagtcgaggtgatgaaggcgctccgcctgacgatgcgcgagatccaggaggtcacctggaaggtgccgcgacgtcacaccgagcgctttcaggacgacgtcttcccgccgacgcgaggcctgcctgtcgcctcgcccgatgcttggcaggccggcgaggcttgcgaccctccgcggatcgacctccgacccgagggcatggggaactgtgcgtcgtcgacctctcggctgtcctctagcgttgaactgacgtcttggcccctcatcagtgtccgagatgcccagggcgcagatgacggtcgtcaaggagaagcccaaggtgcgtccggtctcgatcattccaacccttgcaccccgcccagctgaccctgagcgtctgaccttggctcgaacaatgacagactggctcgcgtgagctgacgacggcagagaaggccaaggcgtccatgaatctgctctttgaaaaggcaaagaacgacgtcgactcggacgaggaggagcgcatcaagggcgacgaagagtggtccgactagacggtgtcggagatcagaagcccttgttcgaccgacgtgtgggcgagacggagcatgcagagcggccgcgaacgacatttgatggcctctgcgatcggcaggcgctctcctatctcgcaaggaaagagcgctactctgccctcgacagagctcgtgagcggcgccaggcactggcggcctggagcgacgtgaaaagggccggccgctgcagaatcgagcgaggtgggctaggctaatcgcagcgtcgcagcaggacccgcacgaaggtggcggtggcggcggcttttgaggcgacgccatgaacgtacctttgaggtcagaagctacagcctgctgtcggtcgtttacggctcctttggcggagcgccgaggctgacacttcagctcgacagtctggctgtcagcccttacctagcaggctgcaccgtgcgcggtgagcgacttgcgagctcacgccttgtgccgaggccattcgtttcgctacgcaaaaaggcgactgtggtcggcacgccggctgcttcgggcttgaacatcctgaagatgaggttctgcaggagggtcgaggggactgttgaagaggcgcagcctgcacgagcggaatacttccgtctcatccaccggccgtggctgccgagcgagttaagtcgcagcatggatgactcgacccgacttatcgtcgtcggaccggtacacgataggaaggcagttagccgaggtctgcggtaagctggcagtcccgcctgcactttcgaggaggccgcgacgggtgggctccttcagccctcctctgcgaccgagcccgtcgctgcgcgcggaagagtgttccgcgacccctccgcggcctacgaatctagtcgagaaggggtcggggtcccaaaagtagtgatcggtcgtcgacctgcccctcgggggacggacccaagcgatgacttgagccgcgcctcgtgtagaggtatgagcagtcgggctcggcatgaggctgctgggagtcgtccgacccggctgatctgcgagaggaccttatcgtccgtctcgtcggcggcgcggcggcgtttgaccttgtgcacgacggtcgtccgccttgtgcagaagggcgaagccaccggggcggcggaggtattccgcgtcgctcttcgcccgtcacgggccaagagcagagcgacgacaacgacagaggtcgagaaggacgaagtcccgcgagaagcgcctggcattgacaggagtttggcagcggtaagcaggtgcggcggccgagcgacaggcaaatctcggatccgaacatggcaagaccagcggctggggtcatcgagggagcgaactcaagccgagagacagaaccgaggcaccggtcgctcaccatcgccaccatacctccctatcctgccccggcttcgactcgagtacctggtcagcgtgcgagaggcacgaaggacgaagcggccgtcgcagcgccgaccaacaacgatcgtgcaccggccggccggccgaccgaccggcgtctgtgcaagcatcagcgcgtgtcagccctcgcggcaacgtctgccgaccgcctccgctctcggacaatcctcccggtggttcgctcatggcgcagacgccgaggccgttcgactcgatgagcaagtcgaggtgagcgccggcaggacgaggttgcaagcccttgaccgctgctggcactccaaccgaccgagccgacgtcaagcgtaactttgtccttatcgtcggctgggctgcgaggagcgctggctctcacggagagagaccaaagacggcgcttgacttgggtcaactgcttagggagcagacgcaatcgataaggccgactcgagcagtcggttacagaggccagggcgtgccaccagtcgacgacaaggccctgtgtgggagccgctgccactcactggccggcagagcatcctctcgaggcgtgccttttcgattccagctcagagagactgtttgaggaggccggcgacgcgggtgatgagattcatcgacgagtcggcgaaggacgtcgacctcccgacgagaaggctgcaggagagagacaggtgagtccgctcttctaacctcgcgagacgccgctgcaagcgaccaggtggtcggcagacgttctgtactggtcgaggtgatgacgagatggcctgccgaagggcagccggccggccgcaaccagcgcagcctcagtcgactgagaagtctcctggtactcggggagcggaggacgtggctcaccttggactagagccgagatgcctccttggagaggtatgggcggccttgaacctgctcgacgtcttgcggtcgtccgagggggatcattggtggcggccaagacgggcagagggtcggcgaaggcccttctcgcgaccgacgagccgactccgctcgagtgctctgcttgactctagccctctctctctctctctccctccctcttcctctcccaacagtcccgtaacgcctggtcagcttcggccccgtctgatccgtcaccaatcaacgtcgtccttcctcggtcggcacgccgtcctcggccaacttgttccgggctactggcttggacgacgcagggctcctgggttggcggccgaccagaagcaacacccgacgctctaccgccagcctcaagtgagggtctctagtaagtgctgagtgcctcgagccgactgcacttgtcgacctgtgctgaccgcctggtcgcttcctttcaaccgatcaggtcggctcggtagtcagcacccgggacgtatgtatgcgcggcgctcctgctcgcgagccggacggccctgcctcgcgtccttcggagggccgcttcaagctccggtctcgatcgtggcgtcccgccttgtcggacgtgctggtctctcgaccgacgacagaccgcgtccaaaccggcctcaacccgtccagacgcatgagaagccgtcgctcaaggtcggcgtgtcagcgtagccagggcgctctgccttttgctgttcttgacgccgggagctcttggagctgacatggcgatcaatctcgtctcgtgcagacgctcggcaacttgcaccgtcaggcgggaccgacgacacctttggcccgaagtctcggctgtgtgagtacctcagcctctcgccctgagaggcagttagtgctgaccttccctctatctggaccgctcgttgcaggtcagccctcacggatgcgcacgccgacgtccagcgtcgaccgcgcggcctcgcggattcgcacacaggcgagaggtcggctctcggccgccggccggagtgcgtcgtgcctcttgctctacactttgcctcggccgacgccctcccggtcagtggcacagaccaggactcgctacgtcactcgctgacgtggacctcttttgaccggcccaccgcccagtcaacgaagtctttctgccgccctcgtccggtcaagcgtcagctcgtcagtcggtccttcagcctcggctgagagccgccccgcacccacccaataccggttcgacgacggcgcccctcacctcgcgcatacgcgcgcgcgcgcgtctctgtgtcgccctaccttccctttgagggctgactcaagaagtcgccgttgtccgaccggtgaatggcgcgccgtcagtactcctcgccttgacacatggggcacaatcagcggcggcccgacggcggcctctatgtcttcggtcggtcggctggtcgacgccttcaccctctcgcagggcccgtcgacgtagccgttccgggccaattcggtcgtcgacgttcgtcgaatcctcggcaggaaggagggagaggtgagagagcagcaattgtacttccgtcggtcgttgcgtgcggaagcgagcgcctcttcgtggatcagggccaagcaccaccattgctgcctcgccctctcggtcatcggtcgaggctcatcccagccggtggtacttggtcaaagggttgcgaggcgcaactcatccagcaccgcggaacacgggacgggcgctcctcgtcctgctgcatgtccctccctcgagaagcagcgacatacctcccttcctcttgcctgcgctcgctcgtcgctggccggctcgctcatactcgtcctcagcccgcagatcattaagtcctgcctccttttgatgcctttcgcatccgagcgcaaagccgtgctgcgcggccttccgatgcctcgccgttcgaggagccccgccgcggcgagctctgacgcccgcccacgccggccattctgctctcggccctggaccaaactcgcccgcctgccgcccccgcccttcgacgccttccacccgcagggcgaggggggggggagggagatgccgatggggcctgccacgcccgcatctcgccgccgaagccgccgtcgtccagagtcggccagactgcgagcggccggccgtggttgagcgacgagagaggccggtggctgctagttctcgacagagagagcagagttgaagggacgcacgctgttgactgagtgtggtggatggtgggtcggcggaggaggaggcgggcgggttcgacgagctcgttctttgcagggcggcgcgcggcccgcccggcggcgcgccttgctgtctcgcgcgcgcgcgcccccggacgcagacgcccgaggaatacttgaaaaacgccagcccagggcacgcacacgaccccgtcggagaggggccacggcgccaaaggcggcactggaacagagtcagagagagcagcctgaaggaagagcgacagagcagctggacagcgcagcctaaataagggaaagcggcgagaaaaagaggggtgtatgcgctggtgctgaagccagcgtcgcaggcggcgaacaagcagaggcgtagtagagccgcgagctgcttactatacaaacaaaagcaagaaacgaggggcaaaaaggtattctgcctcggtcggaggagaaggggaaagaaattggtagatgatggctggtggacgacacacagtgtttcacatagtaaaaggcgatgggaaagttacgaagtatgtttcgtccgccatctggatagcaagaggatcgactggcgtgagagtaggtccaattccgcacaattgacccggcccgctgccgctgccatcaccctccctcgtgcgcctgcctgccagctgccactctcactctctctatccctcctcacctctcttccaccagcctcgcccagaagccgccatgtgtgcgtccgccagtgtctgctgcattgtcgtcatccccttcgctgaccactgttacccctgcttattcctgcgcgctctctcaaacccacctttggctcgtcctccgcctcctgcagacaacggcatcggtccgttcgccacgtcatgagcctctcgttctacctggtgctgacatctcgcccacccgtccacctacaggtctccagactgctcgaggcaggtgcgtatgctcacagtcgcccgcggttacggccgaggagcgacctggagctcgaccgaccttgcgtgaaccgacgtgctgaccctcgccttctccttcatcacgtctgccgacgacttcagcggcacgaacggctatggtgcgtgcactgcttggactgctcggtcgacgggctcgaagacgcgtcctggccgccagccctgcgagcgacagaccttgtgctgatctgcccttcttccgccttcagtcgtcaagaacatgtctgctttccgaccccgcgacggcccaccgaacggcggggcgttcggcaccggtgccaacgcctttggcggggccgacgacttcgcgcggacgtcgcgcggacccgaccagggcatcctcgagcacgagcgcaagcgggcggttgaggtcaagtgtgccgagctcgaggacgcgctcgaggagaaggggtgcgtcgttcttgccctcccacgcatttgcgctttgctgacagtggctgctcgccttcaagcgtgcccgaggacgagatcttcaaccaggtgtcggcgctccggacgcggctgctcgcccagctgcctcaggcccgggacgtgaagtcgctcaagccgtccgacacgcacgccctcgccgaggctaagacggtccagctcgcgcgcttctcgggcgcgttcggcatcagccagggctaccgcgagggcgcggcttttgaccgggacgagcaggagcggatccgggcggccaagcgggcagagtacgaggagaaggaccggctccggctcgagcgcgcgcgggaggccgagcgggaggaggaagtccggcgtgaggccatcaaggtcgcccggcgtgaggacgagcggaggtacgtctgcttgcctgtcgtcttcttcccccttgtccttcgctcgtgcgactgacttgacacgcctcttcccttgcagacggatcgcatccgagcgcgctgccgcccgcgacggccctgctgcgtcttctcgccggcgctcaccctcgcccctcaacgacggccgccgggcccggtcgttcacgcccgtcacccagcgcggccgctcgctctcgcgttcgcgctcgcccgtcgtccgccgccagcgctccatctcgtcttcgcggtcacactcgcgctcgcctccgcctcgtcggagtggcgcggccgacgctggccgccgggcaccgtccttcacgcccgtcacccagcgaggtcggtcgcgctcgcgctcgcctgtcggccgccgaccgcggtccatctcgtcgtcgcgcagccgctcgcgctctccggtcgactcgtaccggaggcggcggctgagcagcacgcctccgcctgcgcgtcggcgccgcgactcggacacgcctccccggcactgaggtcagatcgaagctgccctcgtttgccgcgcctcgctccggatgaggccggccatccaccggccccttcgcttgtcccgatcaacactctgctcctctcgacatcgccgtaaagccgcaccgttccgattgttgtccatcgacgctgcgactcatgatccctttcttgtacctcgcgtcaggctgcccctttgctccggctgaggcgaagatccctgcgaaccgcatgatctgagttgcgcccccaccgagagctcatgcccgaccgggccggatcttgagcgagaaatcgatgtgctggaccgactggtggacggtcgaggttgagatgatgtcgatgtctggacaaacgtagtgactaaggtcagcttggagcgttgttgcgggactgggagcagtcgtagaaatgagcgaggacggacccttgctgagccggccatcgagattgttctcctcgattccgcccgagctctcaagcaggaagccccggcctccctcgcccctgagccgagcctcaatgtgctcagccttgagcgtccgcgcgacgtcaaagagtgcgtcatgctcgaggttgtcgagcatgataatgtcggcaccggcggcgacggcttcgcggccggcctccagcgacgagacctcgacttcgattcggagggcgaaaccagagacggaccgagcagcggcgacggcctgcgtgattgagcctgcgcgaacgggcgtccaggtcagccttcagccaagctgaagctcgaggcggaggggagacgcaccctttgcccagatatggttgtccttgagcataaccatcgacgacagatcatatcggtgagcgtcgatgccgccgacgagcatgccgtacttctcgacgaggcggaatcctaagccagatgggcgcagcaggggatgtcagcctgcaagcgcatgtttaccgcggtcctgccatgtgctcgaggacgcacccggagtcgtcttgcgcgtgcctgcgacgattccctgccaccctgtcttgcgagcggcgagcaggagccggcgtgacttggtcgcgatacccgagcaccgggcgagcaggttgagcgcgacgcgctcgccaagcaggagctggcgcgctggccctcggacggtcgcgacagtcatgatgggcgtaaaggcctcaccctcccggagatgccactcgacgctgagtaggagattgacgaaaggaaggaagccagtcagctcatcgtcggccgaaggcggcgttcggcggcggtgctgctgcgatggggaggagggaccgacgtgcagccgagctgggcaaagacctcgtcgacgaacggcacaccagcgaggacagcctgtatagggaaggaatgaggtcagctcctgagggccggaactgcaggggccgagcctctggctcacctcagtcttgcccttgccgagaagctcagccagctgcacctcctcgccgacgacgaagccgccaaagtcaaacgacggcgtgtcctcggccagccagcgcgtgatctcgggcttccaagacggaggcaggaggtgggcgtaagagccgaggacgggtgcgtcgagcctgagagaggccatggcgttgcaggaattgggatcgatgtcgggacagacggcccgacggtcggctcgacctcgaactcgtcctcggccggcgccgacacagaggaccggccgcgcaggcgacgagcgactcaatttcgtcctcgaggccaccctgtcggcaacctccatccctttcgcactcacctcctctaccttcccaggcgcagaagcaggcatcgcagacttgaacagtcctccctgctgccgcgagaccgagacctaccgcccggtccctcccgccgccaccccccagctccaagcctgccctgccagcggaaaatgccgtcttcgacagtccggaggaaggctccaggctcttcgaccgccgctcggccatccaagaggtcaaaggtcgcgccttctccgtcatccgaagggtcggacgtcgagtcgaacggcaaccgttctgtcggagctgggtccgcttcgaggtcggtcgaccgctccggctccggctccgacgacaacaacgacgacgacgacgacgacgagtctgaggacgaagccgccagcaaggcggcgatgctccgagccctcgaagctcatggcaggtccatgtttggcgccgtcctgccctcggcagccgagccggcgcgagggtccaagggcaagggccgggcggcgcccatcgacctcagcctcgagctctcggacgaggacgacgccgaggacgatgacgaaggcgacgagtcgttcgacgaggacgacagcgaaggcggcatggaggatgacgaagcccgcttcagtggtggcgaggacggcgacgacgacctgctcatgccagtcgcatcctcctcgtcggcccctgctgcccggaaaccggtcgagatcacatttgacccgttgcagtacaaaggcggcagcaaggcgaccaaggccgagtacaaggccttcatggtgcgtcggactcgcctgctggactggcgagaccaatgagcgctgacccctgctgtcaacccgcatagaactcaaaagcgagcaagattctggccgacccgcacgcgatcgccgacgagacgaccgtcgaggcgtcggatgagaagtgcgtgtcgctcactcataagcaggtgaccccacctgaccgtcctgtctccgtctccagactcaacctctcgctcgacaagacgttgcactcgatgcttcagccgctgctcgcctctgacggcaagcaaaccgctcactcgctccagggccggctgactgagctcagcggcgactcgcgcctcggcaagggcgagaagtcggtccgcaagtcgctcgtgtcgtcgctcggcgccagccgagtgggtaccggcctccgcaaggtcggcgccgagaagtacaagcgcgaggttgcgaccgcccgcgagcggggcgagaccgagcagatgacggccgccctctcgggctcgctatatgccgacgaatacggcaaaaagaagaacgccaatggcaagggccgcaaggagacggaccgcgggctcaagatgggcgtcggctcatttggcggcggcaccctcaagctgagcgcaagcgacatggagggcgtcaagcgcgaggtcgaccgcaagaagcgcggagccgagcgcttccagcgcgagcacggtcggggacgcgggcgtggcggtggaggaggtcgtggcggtggtcgtggcggcggcgcagggcggggcggaggcggcggccggggtggtggctcgtcgcgcggaggctcttctcgtggaggatcgtcctcgcgaggacgtggcaagtgatgcgatgctgccgagaccatcaacaagcagcgctcgaggcagaccctcgacgcatccagacgagaacatcatagctcatcccgctacgggcgcgcctctgcgccctctgccgaagacgacccctcggacgacgctgccagcgcgtcgagccccgacgaaccgctctcctgagcactcgcatccgtacgaacgaagcgaccctcgccgtctgcgcgctcctcctgccactcccacgtccggtcggcgttctccttctcgaagtcgccgaaccagagccgctcgcggccgagccgccgttcgttgcgcgggagcgagtcgtcccggcggagcgtgatgccgacgtaccgccggtagcctttcggccggttcgtgtcaggcacgacgacgctcgacctcggcgccttgcggttcggcatgtttggcgagaagattggccggttcgggtggtgcgggagcgagtagaacttgaggtagccgggcgtcagcgcaaagagggtgtggtcccggccgacgccgacctgcaagagtggcggagttcgcagagacgtggcagcggcagccgaaagggggagtgaagagcaaagcagcggttcagcaggagctcgtggcgacgagggacgaggcagctcgagggagcaggcgggaggacggacgttctggccggcgtggatctgcatgccgcgctgccgcgagatgatgtctccaggctgaacgagctcgtctgtaagcagatcagggcaaggctgaagtcagctcgggacggtcgagctcgcagcgtcgagagagagagcaaggggactcgccggcgaacttcttgacgcccagccgtctgccgatcgagccgcggttgttctttgtcgaaccggcacctttcttgtgcgcgagcaggattgccgaggtcgagaaggcccgagcaaaggagctcgaggccgtggccggtgccgagcgaaggagggagaacattgagagcgggaggatgggttgcgagcaggtcgtggtcgggcgagtcggcagagggcgtgcgcgggcgtctctttcggcgcggcgtctccgcccggtcccttgcagcagcgaaagtactcgtcgacctgatccctcgtgcagatcgcctcatcctcattctccctcgcttgcgaaggtcgcactcaggtctatgtgcatctcaatccagcttgagcgccagctcgcgccagcgctcctgacgggccggatcaacctcctcgagccgccgcagccagaccttaacctggccgcgcatctcgtccttccggtcggctgctggccccgccaagattagcagcgagtagtgcacgagcgagtccatcggccacttggcgtctggctcgagctcgtgcagctcgcgcaggagcgccatctcgcgcttgaggatcgccgggtcgtcgccagctgcaagttgggaaagtcagcagatggcgcgaaagcgtcaaagtcggcgaggacgcactcttcgtaatcaaaaagcggtggtagagccaggaggactggtcgttgggatccgtccagagcgcctggttgacgagctcgaactctagagcgcgctcaaaggcaagagggtcagtcctgagcatctcttgaaggcagcgcatgagctccaagcacacaccagcctccgactcctcttccgacgcaaaggggccttgaccgaggacgcgcatgcgctgatgccaggccgagaaattggaaaagttggactcgatcttcttgcgcgtaaaggcaagctcctggcgacgttctttggcgcgagcagtctccgaatcgtcggccgacagcgtaagaagcgacgccaggacgtgccgccggtagtcccaggcatggactgcacgagtagcagtcagcgtcgactgcgcgatcgggttcgagcggtcgggcggagcttgtcgcgtaacgtacaatttcgcggatcgactgagagcatcttgtcgacgagcaggagctcgcgctcccaggcctcgcgcttccacgtcgtgtctggtcgactggcaactgctgctgaggatcggcttcccttaaggacgccagccgcgtcgtctgccgtcgccgaggaagggctaagtgaaggcgtaacttcattagctggcgcaggcccatgcgggatgttggatagacaccagagccggtgattccagatccagtagacctttggcaagctccggaggatcgaggtcgtcaggttgatgtcggcgagcagccgtgcgagccgcttctcgagggcactgacgaaaccagcagacatcagctccaagtacatccagctgcagtggggagatcggagctcgactgacagcgtgtcaaagagggcgaggagcgtccgccggcgaagattccaggcggtgtagagctcagggttgagcttcagcgcgcgcgaggtgaggtcaaacgtcgtctggtcgagcacgttcgtctcattctatggaaagggcaggacgccgcaggtcagctcgattcttcttctcttctctctgaagacagggtgcagggatggtaccctttgcagaaggtcgtccgccaggccctggtactctgcgatcttgggcgcctccttgagacggcgggccgcgagcgactcggagggtttcgtgcgccggacgccgtgctgccgtgcgagcaagaatgaacgatgagcacctgacaggagcaacagagtggacactgtacgcaccatagctcgacaggcagcttgaacgggcgatgaagaagacgagcgagatggaagtcgggcggccgctccctctctccgctcgcgtgggaaggacgacgcgtcgcgtcgactgaccagccttccgtcctgatcctcaaccacagcttccctcgacaacgcccttcccccttctccggtctgcagcagagctctcctcctgcagctcagctcaagccggtcagaccatcgaaattccgaactagctgtcggccctctcgctccgccatgggacgacgactcgcggccgggctcgtcctggccctcctcgcgtttggcccggcgtccgtcctggccgacgtgcccgagcgggcgcgagcgcatcagaagcgggccgaggtcgtcgccacgcccgatgacaagccgtgccttgcgactggtgacgaccagacgatcaacgcgctcctgtcagacggtgcgtgccctatcagaagggaggcggccttgcgagctacgccacgtcgcttgatcccggaccaacccggtcgctgaccttctgctcccttttgctcgacgttgaaggtggacccgggacgcgcgtctcgctctgcccgggcacaacctttcagctgacgggcccggtcgtctttacggccaaggaccaggagcttagcacgcaaggctacccgatcgacgagacgcgcgctaagcttctgccgatgggcaagacgatcaccgccgtccagtgcgtcgttcagagccgacgcccgtcgtgtggccagcctgcacctgacccttgaccgcccacctgacaggggagactgccgacgatgtgcccgagtcgccctgcgcaacattcagattgacggccagcgtccgcgcctcggccgcgctccgccagaggccaagggcggacctctcgtcgccattggcaacaacgaaggccaggttgtcgagcactgcctgctgacgaaccctcggggctgggccgccgtccacatccgcgagggcgacaacctgaattgcgccggcgcgcgcatcgagtacaacgagattgtgcgtctggtcttgggatgcaaaatggacctgcgctcgagctgacctctgccactctctctcttcagggtcccgtcggagaggagtgggtggaggaggttgacggctcggatccggagatgagtccgctcggcaagccgctgggcgacggcgtcagcctaagctgtaaggactcgaccgtctcgcacaacgtcagtcccttcagactttccattgggcctgccgatctctactgatcgctgcttccgtctcgaccgcagacatttgtggacacgacggacgcggccgtcgtcatctacggctcgcccggttcgaccgtctcgcacaaccgggtgacggcgcggtcaatgtcgcagatgggcggcatcctcatggtcgactttgggccgtttgggggctcataccttgggaccaaggtcaccgacaacacgatcgatgcgctcggcggcctcatccgcgtcgctatcggggtcggtaccgccgtctggtccgacgactttgagacggtcctgaccgacggcgaggtccggggcaacaccctccgcggctactggatgggctacggcatagtcgccgccggcgtcaagggcttcaagatcgtcgacaatatttcgaccgcccggcactcgggcacccagggggagcgatgccccgacgagccgaccgtaaacgcaccgccagcagcattcctcttcaccgaggcttcatcgcagggcgagttccagaaggagttcgtcaacggcgcgatccagtacggtgggtgcctctgccagccgtctcttgaagggttgccctatcggctggctgaccggtcacgcttctgtcttgcgcagtcgtttgcatcgacccggagagtgacgccgacgacctcctccggaagccgaagcggccctcggtcgctgagccggtgagtcaccctgcctggctcctcgagcgttgctagcacagactgatccgcttctgtcgacattgcaggaggacgacgacgatgacctcccgcgcgagaggacggtcatggacgagatctttgaccactcgcgccagcggtttatggaggcgctgcaggaggtcgagaaggacattgacaacattgccgccgtcaaggaagcctgggagaaggcaatggtcggcaagtcgacgcgcgagatggacgccggcatgatcctgtacgccccccttgcttccagtgtgacgtgccctcactgacacgcagcgccctcaggtcgtccctgtcgggcctctcgacacgcgtcgccaacctcgaatcggagcggcgccacctgcgaaagacggtcgatgctctgcgagacgagctcatcacgctgacggccaacatcgacacgtttgaggtccgtccgttcattctgatgtgtttccgagcgcgccagctgacctcggcgccctcgcccgttgcccagaaccgcgagaccgacatcctcgacgaggttctcgcgatcgtcagcaactcgccgcgcttgccgccggtcgccgccgccgccggtaagcctgccctgccggcgccgagtagcctggcgaagcggatgcagacgaaagcggcacagtcgtcgtggggtcagctcggcctgctcgggctcgcccaaggcggcctgattgcggtgtacgtctggtcggtccgcggccggcgaagaggcaaggacctcaagaccaactgagctgccgatagatgtgacactagcacccaaacgctccgtcagctcgggatgcgagcggatgaagatgcaggagagacgtacgtgagcgcctgtctcaaggtcgtttggcgctcttttgtcgccggcgagcttcgatggccttgtgatgccttcggcgttcaaccttgcgactaaagcggggcgggaagggagagtcagtacgtctggaataacactctccggacccagcagcagccggctctcacagtcccttgcgcccgagagagatcccaatgttgccaaagtttgcgaggaagatgacgccacacagggcggcgagcagcgggccggtaatcttccagaagtagccgatggcgccacttgtgttcggtcctgtcggcgtgtcgccttcggcaaagacgccgacctgatgagatgcgacgtcagctagtgtcgctgtgctcgaggtgtgggacgcagtcggcgcacctcgggaaagatcgcgaagttcatctgctcgcgcgggagggggctcacattagcaggaggaaagggcgagaggagcagaaggacggacgccaaagtacttgagccggcaccgaaggagggtcagcgcggacacggttgaggagtacgacgttcgcaactcacaccagtcaggaaactgccgcgagcgccaaatcgagctgggtcagccaccgcaagagactgactgatccttgctgaagggcgcaccttagaggcagaaagatgatgctgcaggaccgagggaaggtcgtcagcagcggagccagcggcaaggatcgagggagcgagggacgcacgatatgaacgtcaggtacttctgctgctcgttactgctaaacgtcaacgagttgaagatgaagtcctgtagaagtaccgccgtcagcggcgaatgagagagggagacaggggctgcctgacgtacgacgatggaggacgccattccagagaagagctcgagcgtgctgagaaccgagtctgtcggacgcgagacaatcagcagaggcagcagagggcgagcacggaaaacgggggacagaccgatatggtcctggacgtctgcgaggtacagtttggcctcaggggagatgtaacccccgttcacgcggggcggagcgtcaggatgagggaccgagccgacccgggcgagagtgcctcggacgtcgtcatcttggcagagcgagcggatgagcgcctggaggggcgtcatggctcgcttgagcatgagcagctggcctgaaagcacgtgcaggtgccggacgctcgtgacgtctgggtcgacgagggcgcgtccttcaagcacgtcgagctcgcgccggaactcctcagagatcttgatagagtcgtcaacgacgacgtcgatcaccgcctcgagcagcatcgaggcgtcgctcgtcgtccggagcatcgtgcccggcgtgtggagccgcttgatgatagcccgggtgagccgctcgccagaatgggtgaagaccgagatgatttcgttcgacggcaggagaaaggtcgagagctgctgccggtcgatgcggacccgcatgtcctcggtcaggtggttgacgacgctctttgccgcgagctgctcctcgagccggtcgtcgagcacgctcgccgtctccgagtcgacgtcggatgggatggcgtcgtcggccgcaggctcaccgtaggcgtcaaactgcgagtcgatgccatggacgtggctcgggtcgtcgctgccggcgccaaaggcaaacgtgcccgccttctccgagtcgccgccgaggacgtggcgggcgtgccgctggtactttgacatgccgaaccagctcaggagcgactgtgtcgtcgaggtctgggcgcccttgtttggcggtttcgtgcagagtgagtggatgaggattcgcgaaaagagttgatctgcagagggagccagttctcgtcagttggggtcgtgcgaggggtcgtccgtaggcggaccaactggagtaccagtcggccttgctgttgctgtgggctgcaaacttgatggcgtcctcgagcgcgagtggatgaaggtcgtagtagatggcgacagccttgatgacgggccagttgaggccgtcgacgttgacccaccgcgctttggcccagggcggccgtttcccagctctctcgccttcgccgaaccaccggagaaaggcttcgccggtaaagcggcgctccttgacgcgctgcggcgcccagtcgacgacgtagacggtcacctccatgttcatgcgctcaaaggtcgctttccgagggtcgacaccgggcctagtcgggagggcgcgagacgttcagctgcgcgccggcccggagaaagggggggagaacccaaggacgcactctgcgcccatcgagctcgaaccccagtcaaagtcgaggtcgtccttgtccgagtagtgcgacgcgaccgagcgcagcttcttgtcggacccgacagtcgctcggcgcctgaggccggctatgagcgacaggcagagtcagcagctgggttcactggacgagcccggcatgacgggcaacgcacctccgacctccggcttctcgaccgaatctactgactccggcgtcaagctccaggttgtcggttcgggctccgacattgcctctgcatcgttggtcactggtgccgccggcggaaagtgggcgcgcggctgctgagccggtggatgggaggccggccgggggattgaggtcggcggatgcggctgcggcggcaccatggtcggccctctgaacggaggtcaggtcgagcgcgaggtcgggatcctgtgctcggttcaactggtgctgagcagtctattgggagaaaggacagctgtgcaacgtcgaggttgcgagagctgctgagctcgcccgcccttgtcaggcaaccttctcgccgcgcagccgaccaactcgtgggctcgggtctttcccggccttttcccttgtcggccatgcttccaggcagcgtacgacagctgtccaagcacgctgtcgtccagagcaggctgctgctcagcgtatgggggcagcgtctgcgtctctgtggttgcttgctgcggcctcgtcgagcggcgtagagcagcgcaagcccaagctgctgggcagaagtccaagcgggggttggcggcagtcgagacgtcagggtgcggggactccgccgattttgtgcggcagttgcatctctcttgccgcctctcgaccgctccctctctctccacgaccactaccaatctctttcaatctcaatcatggtttacactattgtcgttcacatgcgggccaaggccgacgaggtcgagaagcttaagtgcgtcctgctcgcccatgtcgttcctagcgagggagccgagaagctgaccctcgactcgctcttccagggccaagcttcacgaggccgccgccgtctaccggcaggacaaggagacgctcgactggcacgtcatgcaggacgtcaaggtgcggcttcgcagatggtcactgctagagacaaaagggcgaccgctgagcagctctccttttggtgcctgcaggagcccaccaagttcatcatcgtcgaggtaggtcgccctgcccttcgaacctcgttgcctcatacggacggcagctgccgtctgacaagagctatcggcattggcacctcgatgctgattcctgtcgaattcgaccgttctcacagcgctacctcaacgaggactcgcagaagtaccacctcggttcgtcgctcaccgctgccttgcccctcggccggtgcaaaactgacctgagcttgccttttcccctcaggtaacccgtactggaaggtgcgtgaagctgactgccacgaacctgcggacgcaacatgctgctgactgcctgtccccctctgccgcacgcgacgacagaccttcgacccttacgtcattcccttgctcgctgaagacatggaccttcaccggctcgaggagttctagtcggcgtatcacaccgctgtagccctagatcacatgcgcatgtctcctcgaacacaacctaacggacgagagtgcgcctggcgagcagcgcgggccagcaagaacacgatcgaacgtcgtttataagatctagggaggggccatctcctctgtgctgacgccttcctgtgggcgctcaagcaaaccgcttgacagctcgcgctcttgccactctccgccagcgcacaggctcgcgcgcaagccgacgctcgaaagactcgcccgcgtctcgctcgaccagctgccgtcggtagcggtcgttgcgcctgtctggcccgccgacgtcggctgcggcgtgctgagagatgctgacgacctgcggctcgtcccgtccgagcggcccgagttggtcgaaggcggaaagggcaggtcgacgcctggagcttcttgccgatcgagcttgttcgggccccttggagcatccggcgaaggctggtcctttaaaggacgcacgtcgtccgatccttctaacgggacgtccgcagcgtcgatgacgccctcctcggctgggcggctctttctggccttacctctccggcggacctcggagacgaactcgcacgagtcaccgacgccgcgcttggcgcacgctgtacacggcttcggcccgccaagacaacggagcttgtgctgcctgcatcgctcgcaggcgatcagcgtccgtcgacgcttcgctttcgcctctgcggcagtcagtgtcaccgtcgagccgtctgacgagccaggggcagcgtcaacgggcgacttcttcgactgttttgcaagccgcggattgatgtccggaggctgagtgggcggctggtgcggtgcgacgggcgcgatggctggcacaccagcaggatgctccagtcgagccggacgccgagggctgctgcgaccctcgtctctgggatctggatggcgcgccgctggcgcaaaggccatccctgcgcggtgagcggaagcaccgacgctcgcgaggggcgggaagatggatgcagacgtgggcggcgggtgatagcttgaccttggctggccgaaaccctgatgagacccgtagtgctgccggagcggaggccggtgctggtccgctgatcgcgttggctcctctggtcgaaaaggaactggcatatggtgtgagaggtggtgcccttcgattcgatcgggatgcgacgggccgtgctgaagcggatggtgagcctcagggtttttggccaggttgttgaagaggttaggccgcggtaacgactgggtgagcggtgcgtccgaccagtggactgccaggaggcaaagcagcgaggacagtcggtcagctcgggagtgatggccgatctaggctgcgcaagactcacacgtcgactgacccggcctgagctgaaggggggcgagtgccagcgagctcgacatgctggccgcccaggcagcggttcgcaaccggccgtcatcgtgccgcgagctgaaggaaggcagcaacggcggcggcggaaggatggggaacgaagcgggccgatgtggcacgctaggcctcatcgagttagagtcaaggccggcgggtgcaggcgtcgttgacgacggtgtgggtgggtcccgtacagccggcactgccgcggcgtacgagacgtcctgttccgggtagagtctgtgggagagggcaacggccgacgctgcgagcgagggcgccagcgacgggcggagctgctggtgctcgcgctggacagcggccgcctctgtcgcccagtccaaagcgaagcggatctcgccatcgtcgtctggcggcgtgcgcacgaaaggggcaccgagggaatgtcagtcagcccggaggtcggacaaggctagaaaggatgacagccttgcgtctcgagggacgcgaaacgagcaatcaagctgatttcgacgtacagcccaaggtgcccatggcgcgagccgagtcggtcggcaggcaggagagcgaggtcggcagaggtcgggcgagcgtgctgacgcaggtggtggctggacggtcaagcttcagagggagcgctcgctgaggtgatgccggctggcgcaaacaggcgacggaatagactgccggagaagctggagatagcggccgtgttgcaggggtcgtctgtagacaaggtcctgagccaggggtgggatgggtgtgggaggagaagcagggcagctgttgcgaggctgattggaggtggtgtttgcttggctggcggcggccgcggtcgtccgcgcgttagagacggtccggaagttggcagccggcgacgggcgatcgtggcgacaacttgtctcaaagagagctcgcgccagagaggagggagcgtaaggcggtcgctcgctgtgcgttcgtcgaaggatgaagaaccggatcctttctttccgcaccagcagtcgtcggaaggtgatgtgcccagactggcaatttggccctggggggagcctcggaagaaacgccatgctagcttttactgctgccgtcggtcgcgttgggagccgaagcgcacgtccccttcactcgaccgtctatacgaccacagggagaacgaggggctcattgcatctcgggcttgacgagccgctgaatctcgtcatagtcgatgagctcttcgccacgctgggccctccagtggttggccgtctcgacgatgcgccggtcgacgaggaacgggtagaggcgcatccaggcgaggccaatctcccacgagtcggggctgaggacgtcgctgccgtgcatcttgaactcggcaaacatctggtggagcgcgatgccgaggttgaacttgtctgtggtcgacgagaggaccgcaggatggtcagcaattgcaggagctcgcgtctaggctgacagacgacgcacctcgatgacggataagcgagtcgcgcaaccatgggaccgggatgccgtcaatcagacgacctggagtagggcaaggcacatgcggggaagctgccggtcagtcggcgcttcggtcgaggctgaggatgaggtgcgcaccgtgcggaatcgtccgctgcagcgtcgtcggaacgagtgaaggaggcaggtggtacgacgggttggctcgaaaattgttgaggtgatagccgatgagctgcatcgcctgctggtggcgctcgccctgctgcgcaatcgcccggaggacgtcagcgctctggaagtactcgtcggggctctcgtccttgcggatcggccgcagctcgctcttcggcgagttgaccggccggaccgtcgcactcgatgtcggctgagccacagcagaagccatctctggtccaggcgtgctaccactcggcccgggcgagaaggaaaagtcgaaagctgagccaaagtcaaacggcgtgccatacggctgctcgaggtgtggaaagctggacggccctgcaaccggcgtcgttctcgatgccggaagcgcgaacgagccgtatgggttgatcggccctggcgtctgaccgggtgctgcctcgccaggcggcatgaactgcgactgcgcgaggccgagcatctcggagtaggcctggtgctggtacgacaggtgcgaggtcgacccttgcggggcgcccgtgccgtcgccgagcgggcccgaactgaacggcggcgcaaagtaggtcggctgcgaggtcgacgagtccatgacgagcgacgtcggtgctcggccggcgggcaggtcggcggccgaaaagtcgttggcggccgacaggatcgagtagcccgaagcaggcggctcatggctgctcgcacctggagcagaccggtgagtcgtagccgaggccgggctctggatatctggcgagtgcgtcgtcgttggcggcgcagtccccgacactgcccggcgcttgttgctccgctcgccctcggcagcgactgtctcggacggcgtcggctccttctgcgagcccgatcccgaggcctgcttgccgctgacgtccttgtccggcaggatggacgtccgcttgcgctttggcggggccgcagtcgtcgtttttgggctgtgcgtctgcccacccggcccgctgccggcgaagatcgagtggctgagcgtttgagagggtatcgcaggcgtcgccgctccagcaaagccctggatacgctcctttgacttgatgaaggcatcaagagccgtctgggagttgcccctggcgaacgacggacgcgggcgaggtcagcgagcgcactgaaaaggtctggccgagaggcttagaggcttcgggacgcgactcacttgttgatgatctcctcgaaaagctcggtcgtcaggcccatctttggcagcgtcgagctgaggtctgccttgaagaagttgcccatcgacgacagcatcgaccgcagctccttgttctcgtcgacgagagctggtgcgagccaagagcgtcaggcaaactggcgcaagatctgaagtgggacagacggcacgatcggacccgacgtacctcggacgacatctcgcaagtggtcgaacctgaagagatggcgaggaggagggacggccgtatcagtctagaggctctagcacgcgtgcgcgaccgtgtgacctcggcgccggtgtcggacggacctcgtgtcgctgctggccgagaggacctcgatgcgggtctcgagctcgcggatgtactgctgcttgcgcaagcggaactctcgctgggcaatcctgtcgggcgagggcggttcaaggacaacgggttagtcagagccaacagcggcggcccgaaccgagctctctctcgagagagggtcaagtaggcccttacctattctgcgccttgcgcgactcgccggcctccttcttgcggcccttaccagctgcagatttgcccttgcctgccgttgatggctcgggcgactgctcggcgtcgtcgccgtgctgcagcgggaggtcgacggggccggggggtctgagcgcgtcagcgctgccgactcgaggtcgcttcgagcgcgagggctgagagcgactggaaggggctcacgagctcgtcgtcctcgctgaaatcgtcctgaacgtccatctctgccgagcgctgttggagggtggctctgctggatggagcagggtcggacgaggtaggttcgggtcaagggtgagcgtctgaggggagtgaccgggagccgcgcctggccggtgtcagaatctggcggcgggagacaagcgggcgatgccgtcggcaagactcgagtcatacagaccagactgctaggcgatgagatggtatagggagcgggcgcaagggtcgtttccagcgcagggtgaagtcgtgacgatcatgaataggatattggagagggctgcgagtgcagccagagaaggcggatgcgcaagtggtggccgactgcctggcgaacccagcctgatcggagaccatgctcaacgtcggtcgagagtcgctggcgacgaggaaagagaggaagacgtctagggatcaagagctctacttctttccgccgccgaaccacgacgagatccagctgccgccagaggctgccgtcgcggtcgccgcaggggcgacattgccctccttggtgtaccaaatctcgtgcaggagcaggttcatcagctcatctgtcggcgtttcgcgcacagagctggcatcagcatggcatccgacgggagtcggcccgacctctgtaggcgcgcagcacgcactcaggttggcattcttggtcgccgacgtctcgacaaagggcgccttgatagaggcggcaaacttcttgccctcggccgccgagaccattctagagcgggcgacggtcgcgggaaggacactcatcagtctgtctgcacgggcagctcgggcgctcgcaaagacgtctgcccggtcgcacctcgcgttctcgatgtcgctcttgttcccgacgacgacgcagggcacccactcggcacccatcgcctcaagcatcttctcatggatgacctggataaggtcaaatgacgtccggttcgtcgtgtcgtagacgaggacgtagccgtggaggccgaccgcgtacttgagcggaaagaacgaggatgagtcctgcgaaggaatcgatcgtcagcccaattgccaaagactgctaccctactgcagtagagcctttggcaaggcaggatgcaaggcgaaggacaccaggggcgggctcgggtgtgaccaaacgacagccgggggccgtgacgttgggcgctgccccgcctccggccggaggccagcagcaggttggctctcgagattgcttcaagtctcccgcgttcccccttggggccgcaggccaagtgccgatgaagcacaggcgggtagcggtgcccttcgctcctgaccggcgggctcgagaggagaggaggggggggggggcaaggaagctcgctcacctggcccgccgtgtcgatgatcttaaccttccaactccggcccgcgaacgagagttccttgtggtgcgtctgctcaatcgtcggatggtatgcctcgatgctctcggtggggccatctatgtagcgcttgacgagcgacgacttgcctgggcagcggaggcgggccgaaaggggcggggcgacgtcagggctgacatgaagccgacacggccgctcaggctcggcagagctggcaggtaggcaagacgtaccgacttgtcttgggccgatgacggcgatgtctctctggatctgatgcgacatggttgctgaggaaggaattggatggggctgacgggctgggaagtagatgctgtcgggtggggaagttcgagacgggcagcagccgacggactctgccgcgctgcgactgggcggcacctgcctgccgctctcgccgccgctgctggccgagcgtccatgtgtccgccctcgctcacgaccgccacatcatcgtcttcgcatctccatcgcttcgcagcttgccagctcatggttcaaggatcatggcatcatgctgccgcgccctctgccgccggctccttgttgcgcttgcgcacctgctggaccggcttgaccttgcgcgtgatcgtcatcagtttgaggccctcgcgctcgtaaacggctcggttcgggtcgtcctcgactacggccgtctcaaagtgcttgtggagttgctggaagaaaagccggtcggcctgcgggaggggatcacctgcgttcagctcggttcgttcgacccccgcgcgcagcatgattgagcgcgaggaccgtaccttgcgccgcttcttgtagctcaggtagatgagcggctgatgatccggatcccgcgtcaggaggaggagcgtgtcgactggtgtgggaagagggggcacgccgtcagtcactggtgtctcgtcaagtctgcggttcgaacgcagggcgcaccgagcaaggggaacgccggctcaaagtagacgcaatcggcgaggaggatgacgtctggcctgctcggtgtgtctgccgggagagagtccttgccccagtcgaggacagccgccttgacattgtcgaggacgttgagcttaacgttctcctccatcagcggcatgaggaccctgcgaacgaggggggcgtcgtcaatgatcggaggagagcgacgcgacactcggcgacgacgcagatccaccagacgcactgctggtccgtgatggtcacacgacaggccggtacggcgatgccgaggatgagaccgacgaggccggtccctgcgccgagctcgagcacctccttgccgtcgagccgatggggctccgagccgaggacgtgcagcaggtactcgcacaggatcttagcgctccaccacctccggtcctgggtcagcatgctcgagcgtcaacaggatgagaaggaagggctgctcaccgtgccggcaggccagacgacgcctccgcagcccgggctcgcgtcgacgctcagctggcacggccgcgggagggtcggaaaggtgatcgaggtcgtctggtggtggaccgtcgggatctgctgcggcgccgagtcgttctcgaagaaggcggcaaactcgtcgaccggcgaggagctcatccttgggcaaggctctagtaagggggagtggcggtctgctggcaaggagcagcaatggcccggaagcagggctcgactgcggtcgatttcgagtcgctggccaattgaagccggcctccttcccctcggcgccctccgctttccatcttcccctggacacctgccgccctctctttccagacagcagctcggtctggctagcgaggacagctccctccgcctcgcctgccgactgcgcccttcaaccatgtcgcggctcaacctccatccgctgatcgagtcgctccagccggcgagctcgcgccagccacttcctccgacccggcagaacgcgccgctcccggacccatcagcaccgctcctgctcggcccgctgccaaccatcagccagctcgagcaggaggcctcgcatcttgcccaatgggaatttgagcgccaggccgaggaccggcggcgcgagatggacttgcacgaggccgtgacgagcccgactgcggagcgagacgagcccttcggccgcaagctcgctggctcggcccagaaggctgcaaagggcgaggccgacgctcacccagccaagaagcctgacatctatcattcgcatgacgtctacaggtcggtccagtcttcagcgtgacatgggctgcggccggacggcgcaagacgctgaccggtcccttccgctcgacctctcctacaagggccatcgacaaccgcgacatggagacgctgatgagggtccgagattcgaacatcaagcttttgctgtcgctgccagcgtcgggatcccgatcaggtaagccgtgccctcgctcctcgtcggcccctctgcttccgctgaccccgcgactgcgactcgcttgccctcaggtgccgtcctacccatcatctacgccatgcgggcgggaaagaagtgggagggaatcaccatcctcctcatcggggccttcagcaagtttgtcaacagcctacaggagggcgaagagcggaccaaggagcagatctcgacaattaagatgcttcgtgcgtcggcctgatctaaccacccgctcgaacttgcaactgagtagaccctccctgcaggtttgaacatcaagacggcgatcgactatggtctggcctcggaccaaacgaatcgtcagttggcgcactccccccgctccgtcccccttgcgcccaagtttaccgtccgtgtcgttgcttgcaatctacagtcatctcgtcgtacctgcaggtcctggtcatgtcggaaggcgatcaattcatctacaagtcgatggcggacgtttcttttgcactccgagccggcccaccagcgacgccggtcgcgcttgccggcgacaaggtgcgcgcctttgcgacgcgcgatctcaagggctgcgccggcctcgctgccgtcgaggactacattgccaactcgaccgccgatctcctcatcctcagcctgtggaccgtccttcggccaaaggacgagatgccgctccactcttttgcacgcgaccagcgcatgctcggcctcttcaaggaggctctggctgaccacggccacgtcaaaggtcatctcggccgggtcgtctctttcctggtcgagacctggggcaggcgaaacgagggcatgcgaagcagggtggagagcctgaagcgcgggctcgacggcgagggcggcctccgctgagtctgcacgcaaggcgactcccctcggttgatccaggctcttcgaagctctgttcaggtgccgttctaggcatttctggtcgtcgtccgtcaaaggcaaagcacagccccgactacaaggcctcaaggaccttcagcggcgctccggcggactacccctgccgtcgggccggctcagcgccgaaacggctgcgctatcaagtcatcggcgacgtccatctcagccgagggttgcggccacgacggtcgagcgctgtctacacgtgcggccagtgatctcatgcggccagtgatctcatgcggccagtgatctcatgtgccgcccgtccccgttcgtccttgcgatgcgaagcgaaagaaaggggcttccggagggcgtttcgtcgagaagcccgcgtggccggcccgccttgcagtcagctcgacccgtcgaccgacacctctccatcatcctcagcccagctcgcctgccttgccaccctctcttccctcttcagaagctggcgacaaaagccaatcaggctcgtcatgtcaatccgtgaccggatatctgccttcgagcgcggcggccagccgaccgcggccgcggaggcctcaaggccaacgagcgacgtgacctcgagtcggctcgacgggcacagtcacgccggcaccccagcgaccctggctcctgcaaggacacgcgattgggctagcagcgcggcctctgcctcgggcagcatgggctcgattgtagactcgagcgggccaaagaggagcccggccgcctcgatctccatctcgccgacactcgcggccagcagcgtcaacgacagcgccctcgctcaatctgaggaggacctcagcaatgtccagctagcccaacgtcccggaacgttttcttcaagacgagatcgagccaagattccctcgcgtctcccgcccggctcgtcttcagcctcggcaccgcgcccagtctcccctccggccgttgcggccttcgcttcgacgctggatgcgagagccttcgtcggatcgacgagtgctaagtctggcgcagccagcaaggctccgccgcttcctcagcggcaggtcactttgtcccaagcttcaagcagcgccgttccggccactcgcctgccgccgctcgccgcgaagcccgcgcacctggccaaaggccggccgtctccgacgccagacctcaccttccggaccaccgctctgccgtcaggagatgacgatatgatcaacttctcgcccatcggtctagcttcgtcgtcggcgagtgcggtcaacggcaacgattcaccacggccgacttcgagaccggcaccaccggcactaccgagccgtcaatcgacggtctcgtcggtgtcatcgctacctccgcccttgccgagcaggaagccgactctcccagccgctgctccgcctgctgctcaacgtcagccgcctccaccgccaaagccatctcagcccggccaggtcaggccggggatcgccggctcctcgccgagcccatcgtctgcgcaggccgaagccgcctcggcgcgctactctgcgctattcactcagctgctcgcgctccgccgagtcgctaagatgaagcgcatgatggcaggcaacgacgagggctggaccgggaccgaggagcgtgacggctggctccaaggcgtcgtcgtccgagccgtctggaaccggagcaagctgtcgcccgacaccctgcgcgagatctggtgcgccttgctgtgtctttgcgccttcgatttgacgctgacgggccctctttcgccaccggcagggatgacgtcgacccggacagctcgggttcgctcgaccggccgagctttgtccgcggcatggctcgaattgacgatcggctgcgaagcaggcgtcgctgacgatgctccttctcacttgacgacatggcgaacgagacaagagcatgatacagagagcgtgtcccttccgtatctgtcttcacagcccacgggagacttcgacccaacctcaagagtgtcgggggactccagggagtccgcgggaagtcaattgaagaagggggagcgaggcgctcgctctgggtcgcgtcgcttgacgttgccgcgaggccatggttgaggacgccggccggaagatcaggtcgacaagtggcgctggggtctgggaagagaccctgcaggcacactcgtcggatctgacccctcggcggcgccccggcaacaggcggctgtcgagcggtggacctgggagggaagctgggataatcgactcggaccgcttgtgactgggagaagggagggtgctcgtaaagggggtcatcgccatcgtcagaatacttgtacaaaggggcgctcagcgtctggcgtgcggaggccgatgctagcagacggagcgactcagtcgctcgcgagacgctgcgccttgctcagaccgccgcgacctccattcgaggctggtctgaggcaaatattgcaggtccagcagcttgtgaagagtgttgacaaaacagggaacctagggcgagtccagggtcctgttgttgcttgtcggtgcggtcaggcctggccgcccaaggcccggacgacgttgccgacgcggcgctcgaggcctttgctcgcgacaaacggcgcaggatcccaccgcaggccaaggtgcgggttcgtcgacgtcggttgcgggtgaaaaggattcgagattgtctgcaggtaggcctgatggatcgcgtgcaggatctgaaggcggagcgaggaggaggtcgcggagggtcagggctctgtccgcgccgaatgaggcaagaggagctagacgcacggtgaggacgtcggcatctcggatcgaggctgtcgtcagcggtaccgtcaggatgatgacgatgttggaagacggcttataaccgtagctgttggcgaggccggcaaggtcagtctcgagggacagctgcagcacacgacgagcgagttccggccagacgcacacagcctcgccgtcgaggacgagaagcaggccgaggtagccctcgcgtccggggccgacgcccgagccggcagcaacggccgcatcgacatagtcgagggcagcaaaggccatgtgggtgtgtgcgaggtcggcctgggctgaggccgggaaggaacgcgtccagagcggctgcgacagcggcgagataagggtgacagacgtcggcgtgagcggagaggcggccatcgtcggttcggccgggtagcgtgtctatcgctgctgctggtgctcagaagaaagaggcgactcgggagagagcagatcgtcggggtggggacgaagggcgctcgactattgtcgtggaaggcggaggtcagcccttgccctcgtaaccctcaccatctcggccccttccgacctctcctttcgccgctctatagccctcccagtcgtcgtagagacctcgcccgcacccactctaaacccgactcgcttcaaccgccgtttgtcgacatgtccgcgcccggaggaggcggagcctacaggttggtccctctcgacgtccagccgggggggcggcgcggccggcatcgcgctggagaccggtcgagctaggatgctgaccgcctgtcgatccaattgccctccttgccagcttctcgcttaccaccttctcgccctcgggcaaggtacgtttccggtgtggcgagtgatcgccgagaatcccaggccagggtgattgcttgggctcaagctgaccggcgtgccgcttcgccctgcccgcgctctcagctcgtccaaatcgagcatgccctggccgccgtcaaccagggagagacctcgctcggcgtcaagggtgcgtccagcttgcgcactgcgccgtgaccgaccggccattgacctcggtcgccgccctcccgtccagcgaccaatggcatcgtcttgctcacctccaagaagcagccgtcgccgctgacggacgcctctgcgctcgagaagatctcgctcatcacgcccaacatcggcatggtctactcgggtatgggtcccgactttcgcgtcctcgtcgacaaggcacggcagacggcccaggcctactggaaaatgtggggcgagtacccgccgacaaaggtcctcgtccaggaggttgcgcaggtgatgcagaaggcgactcagagcgggtgcgtttcgccctttcttgcacggcagtaggctgctctgctcttgtgttgctgaccgcccgccgacctcccctcgttcttgcagtggtgtccggccgttcggcgtctcgctcctgattgccggctttgacgcgcactcgaacacgccgtcactgtaccaggtcgacccctcgggctccttctgggcgtggaaggcgagcgcaatgggcaagggcatggtcaacgccaagacgttcctcgaaaagcggtgcgtcagcgtggagccaccaacgagcttgaccggccggctgacacgagcgacggcccctcctgcaggtacaacgacgacctcacgctggaagacgcgatccatacggcgctcctgacgctgaaggagtcgttcgagggcgagatgacggcccagacgatcgaggtcggcctgctaacggtccccaagccgggcgagctcgacgtcggacccggcggcgaccgcagcaggggcgccttccgcaagctgagcgagcgtgaggtcaaggactacctcgacctttgatcggggccgtctccttgcggaagcctccgacgagtgattgaatgcgatggccgccagagtgctcggccggctgcgaacgtacgttctactcttcagaaagggggccgctccagcgacctgctctgtatgcaggcgtcttcctgtggtgagagtggggtcgccgggtaagttcgtcctgtgatttcacgaagactgccgctgcgccgcccgggtcgagtgcggcgtcgccgggctgtcggagcgaccgtcgccggttggcctggcctccttccctctcgccctccatcaagccggactcttccttcgagcaagccgctttgctcccactcgcgcttgcagctctggccgacgccggtcatcatcaggtctagcatggtgcgcccgaagcaggagctcctgccggcagcgagcacctcccttgccggctcagatctccagacggcctcgaccgcctcgccggtcgctgccccggccctcgagcggtcgtcctcgtcgtcgtcctcggtcgagcatcgtcagcagcttgacggcgaaggctctcaccgacgctcgcctagcctggctgcgaccgcgacgatggcagcctctcacgccgggtcggcggcttcctccggccggccagccctggcacacccgctccctcaggtcgggacgatctcgacccggccggctgccctccagctcgagacgtcgaacctctggtgggtcggggacgaccaatcaaagggccgctcgaccgagatcgagctctcgccgaaccggtcggcctcgtcaagcccagtctcccggagccactcgcgcatcgcggccaaggcgtccgatcacctctctggcagccagtcgcaggccgcctcggcgaacaacgccggcaccaacggtctctctcatcacacgccctccaatctccggcactcgcggatcccgtcgatgaactcgccaccccagttgacaggcagctttcccgacccaacgccagccggccggcacgtccggcccggcctcgtttcgtaccactcgcacctccagccagaccagtcgttgccctggcagcagcggctcaggctcgcctgcacctcgccagataacggcaggtggcaaatgccgcaggtcttgacgccctggttgccctttatggcctatatcgcgacaagcctcggctttgtcgtcgccttcaccttcttccgccaggagctgttcaccgggctcgacacaatgagcgtcagcctcgctgggatgggtctgctaggcaagacgatcatgggtctgtctgcttggttctacgccgccgacaccgtcccgacggttgcccagggcgctgacctgcgaccctcaatcccctctccaggcttcctcatcttcctgacgtgcttcccgccgctgccgttgtactcgaccctcatcatcttgagcggctacgcttttggtgcctgggacggtttcgtgataagctacgtcgctgcgctcctggtaggtctccgtctgtcactccgcaccgcaggttcgagccgatgctgacgactgggctgctgcgcgcttcacgcttccagggcgccttgatcgtctttctcctctcccggtcgctcttccgaggcgcgatgatccgcatgtgcgggtgctttctcgtcagagccttgcttccgttcctcagttaatgccttccctgctcacccccaggttgtccaagtcgccgtccctggccagggtcatccacgcgatcgaatgccggccctcgcttctcttcctcatccggcttgcgccttacccgtacaacgtcatgaacacccttctcgcttcttcgcggacgctctcgctcaaggtttacgtcggcgtcactggcgtcagcctcctcaagctcatgtgcgtcgatcgagtcctgacgaggcggcgcccaacgctgacatggccgccgggcttctgctcgccctcagcatccacacgaccatcggctcgaccattcacaattggggcgaccactatggcgacgacgctgtggctggcggcaacggttcctctcatcgaccacctggtctgacaccagagcaggttgaggccgcagcccggggccagatgatccagaaggcgtggacggtcatcggtatcgcgtgagtctcgggccagcgtctcgccagtagctgcgctgacgacctctccccgtccccttcctcagcctttgcatcggcctcttcatctacctgacgattgtcgcgcgcaacgcggtcaacgagacggcctcgccctccagctcgtacgcagccctgccgacagacgacacccgcgagatggcccagcgcggtcgctcgatgagccgcagcagcgattcaatcgacggctttgatcgagcggacgtcgacggatccggcgggggtgcagtcgcgcagcatgctttaggtcagcagtggcggacgagcaacggcaggcccttgagcgtcggcggatttgaagacgtcgccggcctgagcgacgtcacgcgcccttcgtagatctaccggctatctgctcggccactcatggaccctctctcttctctgaccctcctgtacgagacgtcgacccctctgcgcgcgcccctttggcgccagctcgcacctgtcgctccgttgtaccgatatctgctctatctcacggatctcgcaccgatgtgtcttgcctgctttggaaccgacatcgacatcgaaagtccggaggaaagaaacaagtctaggttgacgcctcttacttgccgccggtgccagacgagccggcggggacgacggcaggggcgaccgactgcttctcctcgggccgcatggccgggaagagctgcgaggtaatggccacaagggggtatcaggctttatcggtgggcgcgaggcagagaggagcggggccaaagagacgtacgaggacctccttaatattggacgagtcagtgaggaacatgacgaggcggtcgatgcccataccccagccggcggtcggcgggagaccgtgctcgagactggtggcgcgcaagagtgaaggaggctggttcagcgacggacagcggcgcgaaggggaaagtcgggtggggcacgcacgcgttgatgaaggtctcgtcaacgccctgggcctcctcgtcgccctggtccttctggcggacctgctcctcgaagcgctcgcgctggtcaaagggatcgttgagctcggtgtaggcgttgcagatctccttggtggcgacgaaggcctcgaagcgctcgcacaggccgggccgcgagcggtgcttcttggcgaggggcgacatcacctgcgggtgaccgacgatgaaggacgggttgatgcactggttctcaatgtactcgccgacgagcttgtcgagcagccgggcgttggtccggggctcggagcagtcgacactgtgcttggtgcagagctcgcggaggaagacgttcgcctcctcggtgtggagcgtctcgcccggcgggaacttgacgtcgagcttggcctcgagctcctcgatcatgtcgaagcgcttccagggccgggcaaagtcaatctcgtagatcttcttgccctcgcccttgccctcggggtggaaggcaaccttggtgttgccgttgtggaggtacttgaccatgccctcgacgagcgtctccgtcatctccatcaggtcaaacatgtcggcgtaggccatgtagaactcgcagatcgagaactcggggttgtgcgtcaggtcaatctgctcgttgcggaagacgcggccaatctcgtagacgcggtcgaggccgccgacgacgagctgcttgaggtagagctcgggcgcgatccgcataaacaggtcgagcttgaggtcgttgtggtgcgtgatgaacggcttggcggtcgcgccgccggccatcgacgacatcatcggcgtctcgacctcaaggaacccgagcgtgtcgaggtacttgcggatgtagttgacgaccttggcccgcgtgacaaagacgtcgcgcgtgtggctgttgagcatcaggtcgaggtagcgcttgcggtagcggacctcctggtccttgagaccgtagtgcgaggtcgggagcatgtggaggttgggcgtgaggagcgtcatcgtcgtgggcgagatcgagagctcgcccgacttggtccgcagcggcgagccagtgaggccaatgatgtcgccccggcggaagagcgagtggtcctcgataaaggcgtccgggttgggcgcgtactgcgactgggcgcagatttggagctggaggatggagggacaaccctaggtcagcgactgatcggtctgcgtaaagcggcgtaggacgcgggacgcacgcgcttgccctccgaatgcaggtcgtagaacttgagcctgcccgagtcacggatgttgtggatgcggccggcgacgctctcctgcagcagaccgcaagcaagagcagaagtgtcgtcagcgacttgcgcacacaagtcacagcatcgcgtgcggggcgagaggacggacggtgatgtcgccgaggcgggagccgggctcgttgcagatgctgtcgtacttctcgatgaaggccggcacgccgatcgtcacgttgaacttgtgcgggtacggattagggttctgcgactggcgcagggccttgatggtggccgagcgctgctcgtagtattgctggcgaaggagagcgtaaggcggcgcatgtcgagcgtcagccgcggtcgccctcggcggcagctgcaacgccatcgcacgacacaggacggacgtgggggtcgaggttggcctcgtcgtcagccttgggcttcttggaggcagcaggcgcaggggcagcagcggccttctcggccttcttggcggccttctcgcgctccttcatcaggagcttgagcttgctatggtcgtcgcggtcgatcgaagaggagggtcagccaatcagctggctgagagcgagagcctctccagcgacgcacgacttggagaccatctcgccggtgacggggtcgaggtgcaggttggcgccgtcggcgacgccggcggcagcagcaggctggtcagacatggggagcttgaagtcgttgaagttgatgggcgagcgctggatgccggtaggccgttcgggtttgcggtagaagctcgcgagcgaggtgcggaagctgcgggcaataagagggagtctgggtcggctggtggcgaggagcgtcctgagcatgcagttcgggtcgagcagcagacgagctcggcggcggcttcggagcgagacggcgcgcagcctctcaaaacattcaagaatcgaccagtttttcatctataaactcgtccttccggcccgcacgacctccaccgtcgccctctcatccaccctacccctccttacccgccttctcttcagcatgctctcgtccctccgcctcgccatcgcccggcccgccttcttggccacccgcgccttcagcgccaccccgcgtgtcgccgacgacctcttcgtgcgtcatcccgtggccgccgcctccgccctcttcgctgcacgatcggctctcggcccagagcccgatcctttcaggtagcccgaagctaattcgtctttcgtcccgctctgcttccagatgcgcggcattcccttcgcttgggagcgtcgtgacgtcgaggagttcgtcaaggactctggcatccaggccgagaaggtctcccttcccccgtccgaccggcgtcagtccacacatcctagtctgcttgcagtcgcttgcctgctcgcgccgcaggagctggcaatgctgacctcagtctttccctgctctttctgctcgtcggcctggcaggcccgaccggcaaccgtggctacgcgtgagtagctcaagcgactggcggctgcgcagccttcacaggcgcacccagacgcgctgacgcctgaacggccgtattctctatgcagctttatcaccgtcgcccccgaacacgccgaggaggttatccagatgaacctcgagtacgagggcgtacgtccttggacctgctggccccttttgtcactccttgccgctgactcgctcgggtgttcttcgtcgcctcgcacagcgccagatcgagatcaagcggtaatcgaccagccaacgacggtaacgataaaaatcagcaatgcttcaaacgcggcacacgacttgtagaccatgggctcccctagcgtgcacttgtaacatcacccccccccccccacatttcccgccttggacgaggttttgtctgctgtggatagcgcgcttgctgggtgcaggtcctggaggactgcggttagagggtggtgcgccgcgttgaggcaaaaggtgctggtctattcctcttgaggttcgagcgggcggtggtggtcggcggtggccggctgcgctctgtggaacgcacgcgcctgaactgcctgcgaggctcgcgacgcgtacagcaagccagcctttgacccgacgtcagcctaagcgagttcgcccctgactcccgtttccgatgctctgcgagctgcgtttctgctgcgaggccgctgcgacggcaccagacgacgtcgccttggcctgtgccagaggggagtttcgccgctttagcccccgacgaccgaccgccaggtccgtctcggcgggccaatgctccgagagtgagccgtcgccctttaaagaggaggcaggccggtcgagatcgtaagcaggtctgtaccctctacgtgcattcactctctcacacatcccacgaaatctgcagacgatgtcgctctcgtccatcccgctcaccgccggctggtctttcgcgcagctgcccaaggacggctcaccgcccgcttccttcgtccgtcgccctgccatctcgcaagccttccccgacggtcacgacggctgacgactcgcaacccccttctcatccgggcctgcaggatgacgtcgagaagattccgacgtcggtccacgtcgagctcctcaagctcggcaagatcgccgacccgttcaagggcatggacgagtgggcctgccagtgtgcgtcttgcctctgcccgtcgagctctggtccgcccgatcgagaagcccctggagctgacacggccatgccctccgcctgcaggggtcggcgaggccgactgggtcttcaagacgacatttgcggttgcgaaggacgagctcaagaaggactcgcacgagcttgtgttcgaagggcttgacaccttctgcaccgtcttcctcgtccgtccgcttcctgcctcgactcgctcccgcgctcgtgctgactgcgatgctgccggcagaacaacaaggagatcctgaagacgacaagcatgtttcacgcgcaccgcgtgccggtcgcacgcgaggcgcttaaggccgacggcaacgagctccggcttgagtttgagagcgccttcctccgcgggaagaaggaggagcgcgagaacggcggcaagctcggactctgtgcgttgtctgttgctgtaaggctcttctgaacggccatgctgactctccatcgcggtggacagggaacggcgactcatctcggctgtatgttaggaaggcgcagtaccactatggctgggattgggggcccgtcctgatggagtgcggaccctggcggccgatctacctcgagtcgttctcgtcgcgtatcgccgacgtccgggtcgactcggtcgtttcggaggacctgtcgactgtcaaggtcgccgtcactgtcgagtgcgtcaggcgtctcagaccgggttgtgagggtccgctgactggctttcttcttacaggaccgaaggcgccaaggccagggcaatcgccgtcgcgctcaaaacgccgagcggcgaggtcatcatgagtggccagtgcgagagcggtaagctctcgtgggagctcaagaaaggccaggtcgacttctggtgagtcttgcgcgaggcgtccggcggagccactctctgattttactcgtctctcgccaggtacccgatccactatggcgctcagccaatttaccatgtggaggtctcgctcatcggcaccgtgcgtcctacgacccaacctcttgcaccaaatagagcacattactgaatggcctgcctccatttgccttgcagacctcctcttcaccggtcgacacagtcgtcaagaaggtcggcttccgtcgggctcgcgtcgtgcaggagccgctcgagggtcaggagggcaagacgttcctttttgaggtcaacgacgtccgcatcttctgcggcggcagcaactggatcccggccgattcgttcctgtccaagtgagtgtgcgagctgacgaggctgctagagacgagacggtgctgaccttcagagactgctccgacggcctacagcgtcacggacgcacgctaccgagactggcttcaactgatggtcgacggcaaccagaacatggtgcggccgtgttcacgaagtcttcaattccctcccctgacctactctcgctctcacagattcgcgtttgggccggcggcatctacgagccggactacttctacgacacttgcgacgagctcggcatccttgtgggtcgctcctcctcccctgcacctggcagtacatcgctcacccttcgccgactgctactcatgcattgcaggtctggcaggactttatgtttggctgcggccagtatccggcgcacgacgcgatgatcgagagcgtcaagctcgaggctgagcaggccgtcaagcgtctgcgggaccacccttcgctcgtcatctttgtgagctcatgtcgcagcagactgagggtctgtacggccgtggctgatgcccttcttctgctgtaggctggcaacaacgaggactaccaggttgctgagtcgctcaagctcgacctagactatgccgacgaaacgagcgacttccggaagaccaacttccccgcccggcacatctacgagcgtactgtccgtctgccccgctcgcactggcgctctagccgtggccatagctgacttggcaatcccttcttcagctgcccgaggttgtcgagcgcctctccgacatctactaccaccgcggctcgccctactctggtgaaggcaaggagacgaccgaccggaccctcggcgacctccaccaggtgcgtcagcagacggcaagcgaccagaagtcgcatgctgatcatcggcttcctgcagtggaacgtctggcacggcgagcagaaaccctggaccgagtggggcaacctttctggccggttcggtgcgtcctggtgtctatcaagagagccgcgctcagaagggccgactgctcgtggcttcccttgcgcccgccagtctccgagtttggcatggaggcgatgcccaacatgcggacgatcgagttctggctcgacggcgacaagtcgcaggcgtacccccagtcgcgggtgatggccaaccacaacaaggccgacggctacgagcggcggcttgcgctctacatgatcgagaactacagtgcgttctgtgcctctcaaagccctcgctgagatccgaccgctgacgacctacccctacccttgccagagtcaacctcgttcaagctcgaggactacgtttacatctcgcagatcatgcaggccgagtgcatcgcggcggcttaccggctttggcggcgcgagtggcgcggtcgtggcaaggagtacacggcgggtgccctcgtctggcagctgaacgactgctggccggtcacgtcgtgggcgattaccgactactttggcatcccgaagcccgccttctttgccatcaagcgcgaactcgcgaccttcaccgtcggccttgctcgaaaggagacgacgacgcccgccgacgaagacacggccgcccacgtcgagttcgctcaggagatggagatctgtgcgtccttctctgccgatcgaaaagaagaccagcgacctgatttcgacctccactccttccagggggcaccaattcgacgctcgagccgcgcaaggctgttctcgaagtgaagacgtttgacgtcgccggcaagatcctgagcgagaccaagacggacgtcacactcgcgccaaacgcgtcgaccgaactgcacaagggcccggtgccgggcatgccggtccgcaagtcgctcgccgaggacgcgccgaccgtcgtcatcaattgccggctgctcgagagcgacggcaccgtcattgcgcgctacggtgagtcaatcaaggcggcctcgggtctcgattgacgcttcgactgacgcgccttgcccttcaaaccagccgactggccgatgccctacaagtacgttgtcttcccggacgcgtacgacccgctcaagatcaccgtcgacggcgaccaggtgacgctcgaggccaacgcgccggtcaagggcgtcgtgcttgacgtcgagggtgatacagccaagtggtcggatcagtgtacgtgtcgctccccctccgccttcggtctgcactgtcgctgactcgttgttgcaacacgcaggccttgacctcgtcccgggcgacaagcaggtcgtgacggcgaccgggctgaacggccggccagtcaccgtccgctactacggcaaggacgatgagtgacggctactttgactaatggcgcatgtagatttctctgcctctgcgcacgcggtcagaactcgtggccgtcatcgtagtcccagacgcggccgcggaactggccgcgtgccttgaggccgtcgagtcggaggtagctgccgaggtcgttgcggccccagcggccaaactcgggcatcgaggctttgggattgctgccggccgtccgcatgaagtcgccaaagaggtcgatcgggtacgtcgtgtcgcgcgtcgcattcgagagctccataaagaagcggccctcggtgttggccgggagcgcccagaagtttttgtcctgctgcgactggaaaaagctgtcggtctcggtgccggccggcgcaatcagtcggacgtccttgacggcgatgacggtcgcccggtcgtcccagagcatgtagtcgaactcgacctcgtactctgggctcgtctcctgggtggccatcgagccatacttgtcccagattttgcggatgacgtggtcatctggcgcaaagtaggtgtcatgccgatggaggaggacgacccgcagcgtcttttggccgtcggggttgcggagcgcgctctccatgtcagaagagattgacgagtacttgatcttgtcgagcgccgtcatgacgcgcttgcggtcgtcgccgccgagctcgagccgcgtcgcctcttcgaggatcgtccgtgccagtggccgcgcagcgaggctcggccagatggcaaagtacgagatgggcggcaggtgcttgaaggcctcgtcgccaccttcgatgccgtactttttgccggccgggaacgtctggcggggggcgtacgggacggccgtctgcgcgggccggttgaggaaggtcgggtcgaagcgcgcaaacgggtcggtcgcagccgcgatcgtcgcgttcgacgagatctggtcctcctcggccaggtcgacgtactcgcggacgaggaggctgccggcctccgtgcgaagtgcccggagatctcctagaaaagtgaggaaagttaggccatctcctcgagcatcgagcacgtatgagcggcacgcaccactgggcgttgtcggggccggcgcggacagctgcttgaaaccggcttcggtcgtgacgacctctgttgacgagcgaggacaccaaggggtcagatacgcgtcccttcttcggttgaacgagaagcagcagacgcaccaagaccaagacgcttgatgatggcctcgcccggcgtcagctgcttcttttccgagaccgcgagcgggtcgacaagcgacttctctgcatcggtccaagcggcgcgagttgggcacgtcagcctcgtaacaagggacgagctccaaagtctggacgcaccggccgcaacggtcgcctctgaagccgtgggctgcgcagcaggcgcttgagacgcggccttcttgcccttcttcttggagctcttcgaagcgggtttcggagtcggctctgagggcttgctcgccaacggatcgacgtccgacttctctgtgggcgtcaagtcagacattcgtcagcttctgacatgacccgctacgctgctccaacctaggacgaacctccggcgacgacatcttcggacgcggtgggcgcagcaggctcagcgacgggcgcatcctcgcttggtgagctcttgtcggccagaggctcgacgtcagacttctctataggcggaagcgttgtcagtcccactacggcagcgtcgagagagttttgagacgagacgaacctccggcgacgacgtcttcagacgcggtcggcgcgggctgagcctcgctcgatgcgctttcgctcaccaacgggtcgacgtcggatttctctggtgacaggtgtggtagagcggaggccagattcagctagcagaaaggctcgccttagatggtggggagggggacggacctgctgcgaccgtctcttccgaggcggtgggcacaggctcgggcgacgtcttctcgtccgccaaagggtcgacggcagacttctctgttggcgcgagagagcgtcagggaggtcagtcagctgaagtcgagagctgcaggagacgcaagaggcaacggaccagcagcgacggtagcccctgacgctgtgggctcggccggcggcggcgaggatgacagggccgcctcctttgccaagctagacttcaaaagatcctcgtcggatttctctgcacgcatcggatcgctgctgtcagctcgcagcctcaggacctttgattcgaacgagcgacgtacctcctgcgacaacggcctcggcggcggtcgcctcggcagctgctgcgtcctcagcggagggctggctagagctcgtcaaggctgctgctgcaagcgataccgcaccgccagaggatcagctccgtgatttcgtcatgacggtgacctaaaggagctcacctgatgactccttctcggtcggccgctctgaccgccagagctgcgtcgaggagaagggtcgggtggccactcggatcgaaaaggaggttgccggccgctgctggagggcgccgggggaacctcctcggcggagggcggtcgacaagccgaggatacggcgatgcatggcaggcaagggactcggccgagagagaggaggctcgatcagaaagcggggtcgtggcgaaggtcgaggtcggaggggacgggcttgggtcgacgtcgtcggtcggttgccgaacctgcaacagcgactccgaagtgcctgccttggcccccttcccttctcccccatctcttctttgccgagtcagcttccagaaccgccttctattccacctcgagtgcccgggccagatgaaccgcctctttggagcgtcgagcaagacgcccaagccgacgctgacggacgccatcgcttcgaccgacactcgcatagggacgatcgaggtcaaggtccgcaagctcgacgccgagcttggccgctaccgcgaccagatggccaaaatgcgcgatgggccgggcaagcaggcgatccagcgccgggcgatcggcgtcctcaagcagaagcggatgtacgagggccagctccagcagctgcagcagcaggtgagagagccccgcgttgccggcagttcgccctcgcttgacgacccccccttgctgactggctgtcgccgactcacttccctctcgctcctctagacgttcaacatggagcaggcgtcgatgacgaccgacaacctccgcaacacggtgcgtcgtcgagcagagacggcgccggtccgacctcggaagtcggctcgctgatgccggtcgctccttgcctgatgctttcagatggcgaccgtcgacgcgatgcagtcggccaacaaggagatgaagaagcagtacaaaaacatcaacattgacaagattgaggtgcgtcctgcgagtcgagattagcaggcttgcggtcccccggtcgctgactcgcttggcgtgaccttgcgcgcgcgcagtcgatacactacgacatggaggatctgatcgaccaggccaacgagatccaagagtcgctcggccggtcgtatggcgtgccggaagagattgatgaggcggatttgcaggctggtgagtcatcttcttgatacaaggcttcagcaggagagctgacctggcctcgttccacccccgtgacggcagagctcgacgcgctcgccgacgagtcgtacgccgaggtcgagtcggagggcgcgatgccgagctacctccgcgacacggccgagccgacgctgccagacttcgtcgacgccgaccctgtagcagaaaacgtgcggccctttgaaggcaccctggccgtccactcgagctgacgccacctgccccggatctttcttccgcagcattctgcccagcccgaggccgcccgatgaagcatcgcgcgtgcgctcccctccccctgttgtacactgcgctctcataccgctacgatggcccctctcgacgtcgaggcttccgtgcgcgcgccgaagtccaggagaaacgccagagacatgcagatccggaccaggggagtaaaaccggcgcgagcgagacgctctaccactgcttctggagtgggtggatgatggtgcccatctgttgaaaggatagcgcgagcaggcatggtcagcggtggtggcgggcgacggcgtgggaggaggcgacagaccttggtgacgacgcgcggcatcgtcgccttctggaccgtcgcccgcgtcgaccactcggagccaacggcgccccggaggctggcctcgtactgggcggcgctcgtgtaagggtagggcaggtccttggtcatgtgcttggccgccttcttgtccttcttttcagagatgatgacgtgcgacttttggaagtcgcgccgcttcgagacgtcgacgcccggaacgtgcctgatgttcttcttcttcgttttgggcttcttgacgccccggccgccccacgagccctgcagagtcgagaaacgtcagcgacggcggggcgggcagatcgcgctcgccctgagacgcacccagcctggcagactcgtgtcgacgtcctgcggcttgtcgcggtcctcctccttaagcttctcctctgcaaagtcctgttaagacgatccgcggtagtcagctccagagtcaaggggcaacccggccggaagggaggaccgacctcgagaacgttgtcaccggcaaaggcttgagcgacgaggtcacgctggcggagggctagcggtcccttgcgctcgtggtcgtcctcgctctcatcctcctcgctctcctcgatgcgagctcggcccttgcccttgtcaaccgacttctttgacggcggtgggggcgcgagcgagacctgcgacgggtcaatgtcgaccatggcgtcgtcctgctcgcgctcgcgcgcctcgtccaccttgttgagcgacttcttgaacgtcttggccgacttctcggccgcgctcgcctccttgcctgagacagcgttcttcttgcgcgagattttcgacgacgacgcgccggccgtcagccaggggttggccgtcgagtcgggctcggtcgagatcatgaacgacggccgcggctgagcggcagcacgcggcggcgagccagaaggattcgacgactggagcgtcgcggtcgagacgtcggacgccggaggccggccgtgcttggaaatctgcagagcgataaaaaaggggcgatcagcgaatgcgacacgagggacgaccaggggcagcgctgaacgcactgggacgacgctctgtccatagacctggcgaccggcgttgccgccgacggtggtgaacgcctggcccggtccatcctccttgtcgtcgtcaccggccgagccctcgccgtcttcggctccgatgtggtccatttcgcgccggaagtcgtcgacggcgccgttggcgtcggcggccgcgcgcttgcgggcgtccgtcataaacttcatctggaagaggctgctcttggtcttaatctcttcgtcaggagcctggtcgatgccgtcaatctcggtgaaggcacgctcgcggagcgtctcgaggtcctcgtcgccgccgtcctcatctgaatcgtccgagtcggagccgtcgccgcggccctgaatgcgctgcttgagccgctcgccctcctggagctggtcgttgagctctcgccgctggtcaatgtcgaggtcgtcgcccttgttgagcatggccttggcccacttgcccgtgttcttgtgcttgagcgtcgcgcgctcgatcgcccggtcgcggtccttcttgattcggagctcgtcctcgtcctcgccaaagccggcctcggcgagcttctcggcgttgcggtcggcctccttgcggacaatcttgcggtacgtcttggacttgattttggcgacccgcttggccttggtctcggcccggaacatgagctcgcgcatgtgccggagctcggcccgccgggcggcgacctcctcaatcgtcaaattcgacatggcgagctcttcgcgcttggcgatcgccgcgtcgtcgcccatctgagccgacgagatgaggctggcgacggccgactcaaagtcgccttttggctggaacttggccgtcagcgcagcggccgacggcttctcctgcttcgaagcctggagggggaagctaaggtgctcggcctgcaagagtccgatcggcaagcgtcagccaaccatcagagcgggcaagagaacgtccatcgagcgacacacctccttgatgcgcttcatcgaggcgccccacttggtgacctcgcccttggtcgcctcgtaagccgcctcgcggtcgagcttgtcttgcgcccgcgtcggcagcggggcaggcagcgcagcgccgctgttgggcacggccagagcccgagtcgagttgagaagcgaggacgactgtgctgcgggcagcggagcgagcagcgtctggagcgaaagcttgctggctgtgagacggcaagggagggcagcgacgtcagcactgaaccggagcctgcgagcgcttgccatcgtcgattcgttgaacgcactcgtgttgagaggcgcgccgaacgagccctctttgcggccctcttcgttgcggtccttgaggacgcgacgcttggtccgactcgagccggccgcggcgccgtcctcgtcatcagagtcgcccggggccgtcttgcgtttcgatgggaggcccatgatgagggacgcgagcttgtcctgtgcgtcgtcgtcgtcctcatcctcgtcatcgtcgtcgtcgtcgtcctcctcgtcatcatctttgctgtcctccaccccctcgtcgtcctcagcctccatatccatgccgtcctcgagggcgctcccggcatcggcagcctcctccgcgcccgactcgacgtccgagccgtcttcagacgaagggtagccctgaccgtcggcgaggaaggtgctcaggtcgacgaaaccttcgctgccggcctcgtccgagtcaaagtcggtcccgtcgttgtcgtcgtcgtaagtggcggcggccgcccggcgaggcgtaggcgccgagtcgccctcagagaggtcaatctcgaggtccgagccatcctcagcggcggccacagtctaggaagagcaaatggtctgatcagccggtgctccgatgcagctgatcgagagaggcagctgggacggaccttcttggccttggtcttcttgcccttgcccttctggacgaaggctgcaccccagccgcggccctcgtcgtcgtcctcaaaggcgctgtcgctgtcgagctcctcatcgtcgctaccgccctcgagcacgagcagctcgtgagagttgacgagctggcgcagacgctcgcggacagcgtcgccatcctcggcgccgccctcgctcccactggcgtcgtcgtcgtcggcgtccgcccggcgctttgcccgcccgctgccgccgccaccgccaggcccgggagcctcctcgtcgcgggtgagggccgagctgacgttggcccgcttgtgcttcttgaccgagagcgcgtacgtgtcaagcgggtcggcgtcgaggtcgatcccgccgtgctgctccttggcgtggcggaaggcgtagtgctcggccgcgccggccccggccttgggcttgctcttggccgtcgaggctgaggaggcagagaagaccttgcggccggccgagccagaggcgcgagaattgcgcttgcccatggaaactgtgtctagaaatggggagagagtgaggtcggtgtcgagctgtccagctgccgggctggctcgaggctcgagctcccgaagcgcgaggaaatctcgctcgatcgcctctggcggcgcgcagcacgcccgggccaccgaagctcgccgctcgactctgcgacggcgacgacagctcaagcaagacttggcgcctatcatcgacgcgacgcgacgctcgtgaacggtcggccaccgacagaactcatgcctgcggtcaacagcagggcgagctggccaggccagacgacacgctgcacatagcctggattagcaggccctggaccgcggctgcctcgcactcgacccatgtcggacgttggtctgacattcgcaacataaagatcacagcccttggtcgtacatgtagcccctggacggctcaatacatgcggagcgagccgccgctgtggctccgtttgcggccggcactcccagccttgcgctgcgagtggcggtaccgcttccaggcccagttgccgaccagcagtgccgcctggaagccgatgaagtaggcaaagagcccgtggccggcgtcggcctcgtcggtcgtcgctacggcctcttcctcgtgaggtagcttgtcggtcgactgcaggttgagccggcgggcgtactggctgtcgtcggcaaccgcgcccgacgcaatcttgcgcgcgccggcgagcagtcgggtcagcatactcgagtggctcgtctgccaaccaggaaagagattgatcagtgatcgggcgattcacagactcaagcagccgcgccgtacctcaaaatgttcaaatttgccgttgaggcccttgaggtcgcccttcatgttgtcaaacgtcccgcgcaggctcttgcggtcgctctcgagattggcgagccgcgtgctcaggtccataagggcgatgctgcggagcagaaggacggaaaggcaagtcagcctcgagcgagccccattgacgactgtacaacgcacgtgaacgggttgcgctcgccattcttgccccggcgcgaggccttgtgcggcttctcctgggcgacctcgcgtacgcgctcgctgacgcccttaacctgctgcaggagtgtcatctggtagtcgacgattgcctcggtcaggtcggcgtcctgtgcgttcggagggtagagggacagaacgtcagtcaagcgcttcagcagccagagccaaacgaaagcacgcacgagctcagcgacggctgccaaggggtcgtggccggtcgcagcgagggctgcctgacgctgggccttgagcgcagcgggcgagtcgcgcagtcgtcgaggcaggccgtcctcgcccggtccaggctggggctcgatgcagatgactgcagtgcggagcgaagcacgtcagtctctagggacggaagcagcctgccggcgaacgcactgtgctggacctcgccattgacaaactcttcctggaaggtgccctcggacgagcccttgttgatgacccagccggtcggcgccttgttctttggaaaggacgggcatcggtcctcgctcatgacgcccgagaagcgtgccgtcggctcaatgtgattgtcgacgacggtaaaatttttgcagctcgcgacgacgatgccgtagccgagatgggtgccggcgaccgtgttgccaatgacggcgccgtgcgagacgatcgactcggtatcgtccgaccagacggccgggccaatattgagcgcgacctttaggtaggccgaaaaggccgagatgtggttgcccgagacgacgaccgacgtatagttgccgtcccacggcgggacgctggatgaggcgatgcaggaaggcgaggatcagcggccggagcaacagaggggacgaccggcaggactcactcgacgaggttaatgccaccgaggacggtccgcgtccgcgcatagacaatgttgttgcggatgacactgcctgggctaccaaagatgacgatggctccgtccgtcgtgtcatagacggtctgcagaaaacgcaaaccgtggccgatcaggagtcagcggccggacgaaggaggtcgtgcgcagaggcgcgggccgcacattgccctcgacgaccgagttcatgcaggcgagactaatgccgtcgctccgaggattgccccagagcggactcttctcttcggtcccatcatagtcaacgtcccactcctcgccgcagggtccctttgagcagggcggacaagagcacgagcgtcagcaaagcgagcctcgctgtgtgtgcaggcggcggtacggtaggcggcgcacaatctcattgttgatgacctttgcgcccgagcagttaatccagtcgccttcgcggaagtgtagcgcactccagcctctgcagtgaaggagaacagtcagtgccaggctaggcggagggtgcccgctcatcgggccggcaggagctcaccttggctcgtagagcttgcagttttcgacgtgctggttgttcgagttgccgagctcgacaagcgcctcgcccatcggcatccggagcatcagcggccggttgccgtcgatgatcaggtccttgatcgtcacgcctgagcagctgatgcagtcgcccctgagggcgggtcgtgtcgagaggtgcggcgggggcggcaagcagcgagcgacagccgtcagctcgagagacaacacccccgttctacggtctgtagagacgacgcacttgatggccatcgactgattctggccctcgacaagcagcatggcccgctgcgggccggtcgggtggccctcggtgaagaccccttggtcctcggccgtgaagaggatcgggttctgcagccggaagagcgcattctgacagagagcgacctgggtcccgcgacctcctgagtccgtgacattatgggcgagaagcgaatgttagtgcgctgctcggcctccaggcaggcgaggcgtgagtcgagctcgggcgggcgcaccccagtcgagcaggcggttgatttcggtctcgtcgccggtagggacgcagcccttgcgcggcgcggcagcctcgacgacctgccgaggcagcagcgtcgccagcaagaggacgagcagcgctgatgagagcatggaggtgattggaagagcgaggggggggggagtcgtagctggcagctgacagggccggctggcctcctcgacgcgacggagggacgcgccgaggcgacctagactaccagagcctctgaccctcatctctgggatgtcctcgcacctcaccggtctcaaggctatcctgctcgacctctccggcactctccatgtcggttcaacgccgacccctggggcagtggctgcactcggtcgtctgcgacgggctcagctgccgatccgcttctggtccgacgcttgacttgcctctcgcccgggtgactttgccctgacctccccctcttcaccctgacgccggcagctccaacacaagcaaggactcgagcgtcgacctcgtcgcccgcctacgccagatcggcttcgaggtccgcgatggcgagctgctgacgtcgctctcggccgcccgcgaggcggtcgtcgcgcgctcgctcaagccgtacctgatgctctccgagtcggcccggaaggactttgagggcttggagccggcagagctcggcgaggccgatagtatcgtcgtcggtctcgcgcccgaagccttcacgtacgtcaggctgaacacggccttcaggctgcgtgagtgcccggcgcagagcttctctgcaagggaggccgatctgaccgacccttcggcgactgcagtcaagaaggagcgcctgtcgccctcatcaccaacaccggcagacggaatgcggtacctgatcgctgcgcacgccggcttgcgcttccaggacgaggacgccgccctctcgcttggtccgggtcccttcgtccaggccctgtccttagcttcgggcgtcgaggccgaggtcatcggcaagccgacgaggggcttctttgagatggcgctgcggacgctggaagcggatggcgtccgggagcaagactggcacgacgtcgccattgtcggcgacgactttaaaaacgacctgagcggcggcgcgaccgaactgggcctccggcgcttcctgggtcagtcaaagcagcagtcgatcaaggggctgctcgcttgctgacccttccgtcctttcatcgcacccgttttacagtcagaaccggcaagtataggaccggtgacgagagccaaggcgacgcgcccgacggcatctgggacagctttgcggcgctcgttgacgatttgctgtctgtttgagcctccatgactcatggatcgccctcgtcggtcccttcaagcagccagccctcctgcctcaaccagtcgccgacctcctctcgcctcggctgccgcgcgggcgggtcactctcaggccttcgccgacccttgaccgtctcccggacgagattgggcagtgtccaagccggcaagacgacatgcgccgggtccggtccctcggccggggcccgcgctccgctgatggccgaaggcgagacgagcgtcgtcagacacgcatagcagagctggcgctcgaccgggatgggcgccgtctgctgctgctgctgctcggcactcgaatcggcgggaagctcgtgagcggtgccggtcgtgatcgacgtccgtgcgagccactccaacggcgcctcatcggaggggctggtgaaggaagaggctctgcgttagccggctatgaaatcttgcttctcaccatccggacttacagctcgcaaagcgggcagatgcggccctcggtccagagcgccttttttgccttgtcgccgagcggcttgcgatctggcccaacaaagcccgggaaaagcagcttgtgcgaagtgcgggcgatcgtgctgacggtcgacggatgcgtgctgttgagcgtctggacaaagtctgcggagggagggagggagctctcggtgtcagcgtcggcagggggaggcaagcacagcatcgagcagggcccaaccttgtgtgagggcttcaatgctcgtcgcccggcccgagccaccgctctttgcgccgctctcccagtcccagtcgatggcggcaagcttatgcgcgcgggcgtaccagacgagctccttcttgcccgacgccgtcagcggccgaatcgtcttgacgccgcggtactcaaggaaaggggcgacgagcagggggagcgcataaccccggcccgcggcgagagacgcgatcgtgagcgatgcgatgcgtgtcgagcttgatccgagaagcaagtagggtgggagcggcttggacgccggcgacggtaccgtgatcaaggacgagggctgatcgagggcaagcgccatgcgcgtgagcagcgagtgcaggatgtgcatccggatggccggatgtgatgttggcggcaattgtgccaaaaggtagcggtagggcgaatcggcgtgactggacgatctcgagtacgacgtgtgaaggactgaagtcgggtggggggaaaggtgggtcagcgcagtcgggaaggcaatgacttcatgagctcgcacctcgtccgggcagcactcggatgccgaccgagcccattgtcgagctccctcgtccctcatcaggcggatcgacgagctcgccccgctcgtcaaaggcttcgtcgaccgatacgcgccagaactcgaagccttgtgcttcggccgaccggcgcatggccgtctcgcgctcgcttcggcggtcgtctgcctcctcgccaaagtcaacccagccgacgacgatccggttccagcgctggcgacctctcggtccagtctcgtctggcgggcagagcgagagccggaacatgtcgatcatggaggctgaggctgagccgcccgacgaggcgaggaggaacgatgccttgccggttggccgggcgttctgataaagaggcggcaggtgggtgatgacagagcgcgcaaagcgagcgcggaggagttggaccagacagtcacttggcgagattgggtgtggaggaggctgggtcgtcagtcgacgatgaggagagtcaaggggtagacaggcaagctgctaacgccgaagcccggtactcgagcctcacctgcagtacgatgtatggacaacgacgaggacgccccgctgcgccttgcatcgtgcacaggagacagagtcgatcgtcttggctgatgaggaagcgctcgacggtcagcgccgaaccgacggccaagctgtcgaagaatcgacagtgggcagggggaggaggcgacggaccgggcatgagaagctcctcctttggctcttgcggctctggcgccgaggaacacgacatggcctgtggttcaaacctccttatcacgtggaaagacggcaaaggtctgtaggaagcctggcaagggtggacgtcggcaacagcagagggtcgaggcgaggctcgcgagcttcgctttccaacccctcgcgcgcagcaaaccacccccgccagccgacgaccagtgtgagctcgcccttccgcccggcagagaactcaggaagccagctttcgctaaacggtactgagatcgggaagagcccatgcgcatctaccgacgattcacgtgccgtacttgccggccttgaagtaggatgcaggaaggtccttgacgaggtcgagccagggccgctcgacgacgacaagctcgtcctcgccaacaaagccgaggccgatcaacggccggaacgtcgtcgtcagcttgaagcggccagtgtcctcctttgcgggcgcatccatgtcgacttcttcaacgacgacggcggcagagtccgacacggccatcttgttgtcggcagcggcggcggcggcagcgatggcgagcgcgcgcttcttcttgtttgacttgccctttcctgtgccgggcacggcgagccggacgcgaaggatccaggtcgcgccccagaggaggacgctccgcgccgagctgccggcagccttccgcgtgtcggccgcgaggccgatgaccgggtcgtgcaggccgcggaccgagtcgggcatcgcgacgctgagcgccggcgggaagcggcggttctcgacgtcgtaggcgtggagctggttgccgtttgggagggcgagtaggaggagcgactgcgtcggcgaaacgggcgagggcacaaagaggagcgcggccggcggctgggcgctaaacgtcggcaggtgggcgtgcagctgaagcgtgtcgaggttgtagacgcgcgtccggccgagcaggtccgagacggccagccattggccgtccggtccaacggcgaggcacttgacggtcgcccggccaccctggctgctgctgctgctgctgctgagagcgccgctcgtgtcgtggctgtcgttgccgtcgacgtccatgtcgccagcagcagcggcggcagtgctcttaacacgcttaccgccggcgacaacgcgaccgccgaccgtcgcgctcgtgtcctgctcaaagacgcggacgactgaggcttcgccgagccgcgagctctcgtccgagacgacggccgagaggtcgacgacggtgatgtcacctgtcagagcggcagcgagcacgagccggtgcgagtcgggcgtgaaagcaagggccgaggcgcccgtgccgttccgctcgaggttcatcgccttcgggcactgggcgtggagcgtcgccgtcaacgtcttgagtcggcgcggggtgatggtcccttcctcgtcgtcctcgtcgaggtagaagacacgcgtctcgccgaggtcggagacggcgagccactttccgtcgtcgctgatggcgctcgcgacaagactcgtcgtcgcgctgagctccatgtcgagcagcttctgccagccgccgccggtgccggtgccgtcgtcgtcgtcgaggagccggccggtgtcggacctgttgatcggcgcgagctcaaagagggcaaggctgctctcgagccgggcgagcatgagccggcccgaggccgagagcgagatggtcgatgcgtcgacgccattgagcgagccttgcttgcggaagaaggcgtcgccgagcagtgtgctgcccgagctgccagcattcttggggatcgggttgatgacggcctcagacccggcgcccgacgccgacgacgacgagccgcagggcgtcatgacgagtgtcgtatcgacaccgcccgaaacgagaacgggtgcgacaatcgtcgtgcctgccgcaccggccgggagcgtcgacgctggcgggtagacggcgagcgcgaggacgtcgtgcgtgtggaaccgccgagcgctcgactggatccactttgccggcagggcccggcgcgaggtcgagccggccgtcgccggggccgggacggccgtaaactggagcgtcttctggtcgatgcccgaagtaaagaccgacttgttgtcgggcccgacggcgaggcagaggacgtcggccgcgtgggccgagaaggcgacgatctgcgtgttggtctgggcgtcccagaagcggacctggccgagcgagtcgccagagacaatcgtaccgtctctgagcgagcgagagggagagcgcggtcaacatgaagggccctctcgaagcagctaagtcaaactgatgacgcacctcaggacgccgacacaccagaccagactgcggttccctccccggctcttgccgcccgaccgcgtcttctcgcgctcgacggccattcgctcgacgacgcggcccgtcttaaaatcccacttgcggaggcaggagtcggagcagccggtgacgagccagctgtcggcccactgctcgacctcgtcctcgtcttcgccgctgctgctagcgtcgctgtcgccgtcgccgttcgacgggaccgccggcagcttcaccgccttcttcgctggcttcgtcggcggcccccaggcaatcgacagcaagcgcgcctttgtccgctcgaaccgtcggaagtggaccaggtcgccgtcgtccgagagcgaaaggagccggatcgagccgtcggcgcagccgagcgcgaggagcgtctgggacgggttgggcgcgagcgaccagagcgtgccggactgggttgggtagagcttctgcggaagcaaaggcaacgcgcgtggaaggagcgaatctgggtcagctaataggccactcgcggcgcgctagagaaacgggggttgctgtcggacggacgaggatgcagccgcgctggagatcccactcgacgaggtcggacgacgagccggacgagaaaagccgaatgtcgtcgaccgtcggaatcggcgcgcgtcgccgggccggctggcggaggtacgcctggcggagggtgaagacgagcgtatcgactttggtgccggcgggcgagacgagccgctgtaaggggagggggaacggagagtcagcttcagccgggctgtcattcagcgaagcgagcgggacgtacgcggtagaagacccagccctggccaccctcggcctgatcgacccacttgaagagctcgacctggccgttgccctttccaacggccatcagcccgcacgcaccctttgccggccggctgctgctgctggcggctgagctcgaggacgccgtcgggtagggcgtcgccggggcgagcggcgggaaggcgacggccgtgactgaggccggagtgtagttgacgaaacggacatgatggagtgggaccgtcatcctggctgctggctggaagtggttgaggatgaggaggaggaggagggacgagagaaggagcaggcggaagtgagctcgtgcggccgccgcgcgaaattcgacagcgcggcggcgaaagagactgcgcgcgctcgagactctcgctgctagcgagcgagccgctggactgcccactcaaagaactcgtttgatcaaatctaggtatcgcatgctgatagtcagggcgtggtgtctctttagcgttccttctttgtctcggccgtggccgggctctttggagcggggggcggcgggggaggactcgacccgagcgaatagacggccgtcccgacttgtcgtcgcatgcgaggaaaggcgtcagtccaacgggggacagctgcaggataagcagaagcgggtgaactcaccaaggacgagcagccctccgagccagatgccgagccctgcctggccggcctggtagaaccagattgagagaaacagcgaggtcgccttcctcagcgtcaggatgagcgtcgtcgtcaagctcgagactctcgacgtcaggcggttgacacccgtcacacagacggcctgcgtgaggacgttgagcgctagcgcggtccagatctgcttgattggaagctcgagcttcaggtcgacgcctaggagggcgacgagctgcgggaggaaggacacgcgggcggacgagggagggaggagggcttcctccctgccccttcttagcacgcccacacactcagatgccctcgctcgcccacccgcacgccctgccgcacgctgcgctccggcccgacctcctgccagatcccatcgcccggacgggcacgcccctctcgcgctcggcctcgccctcgccgcgcgacccggcgtcgtcgaccggtcctggaggaggaggactggccggccacccggcctcggcttctccctcaacgacggccgctggagcgccatcgcatctccatcaagcccaccctcacacgcagcagcagcagctgcaccacccgctgccgcagctctatccggcccacgcccacgccaacgttctcccgccggtgccgacgttcttacacgccgctgcgccgagccggcaaccgccagcctcggcatcggccatgtcgtccggcccaacctcgccctcaccaccgacgacgcccaccccgtactcggccgccgctggtagctcccggctctcccagcagcagcagcagcagcagcagcagcaatcaccgtcgcccgtcgccacctgcagcccggtcgagattggcctccgagagactgacgaccgcgagggcgtccaccacggctcggacggcaaggccggcgttgacggacttgcgcacgctccgggctgggtcgacggccacgaggttctcgacgtcaagggcgggacgaaggtccgcgctatctccgctgacgacgtgcgttgccctcctccgtccctctgacggccttctttttcacgtccgcatgagactcacattgacttctcctcatctcggtctctcgcccaatccttcagttcgcctcgctcgagcagcagcacctcgcactcgacgtgcccgagacgacgctttttccttgggtgcgttctcttccagctcgaccgggtgcatgcgtggttcaggtgtcctcaccactgatgacgatcattctctgcacagctgcacggcatgggtgatggcaaccgcatgctcgacgacttctttgcgtccttcccggggtccgttcgcgcctttgtcgctcgttcaatcctttcacgactgactcatcctcttccggatcctttcagctaccgcgcccagatccctgctccgcgctaccgcggcctcacagtgctcctcgccgccggcccaggcgactcgcgcccgccctctgcgacaggcggcgcctcccgcgcgtcgagtgacggccttcgttcgcttttcgaccggcgggatgacgacgacgaggcggctggccgaaagaggggtgggagtctcgcgagcgacttcagcagccttgggagcgagacgtcatggggctactgtgcgttgccgggtcgagaagattcgcttaatgtcctcggctgactctgcctctacttcgacctttcgacgatctacagccgaggcaagctcattcccgacctccatctcgtccttctcctccatctcgacggcctcctcgtcgtcgtgcgcggcccctgtctcagccccaaagccgaccgccgccgctggcatcgtcgacgcctcaaccggctcaatcggcctgaacccggccccgctcgcggcctacactccgcctgcctcgccgccgaccgccagcagcgggacgcactcgctcttgacgtcggctgtcctggccgaggagatcgtaacgctgacggcgcacgcgagccgccgggtaggcgcatcgccagggcagcagccggtccggcggacgagcactgccagcagcgtcgctggaggtggaggtccagccgacgaccgcgtgacgggcgatgagctcgcaaagatgccgctcggccgcaagggcgtcgtccgcggcacgttccggaagcgcgacgtcggcgagggtacgatcagcctgcgtaacctaagcgtccagccgaagaagtatgcgaccatctcggacattgtgcgtcgccttcttcctctcagctcaaccgtcgattgctagcgctgacacttcggtcggtggactttctctgaaaggtcgtctatcacccgcaaggcttttgttgctcggccctcaacgtcgctgagcgggtcgctgaggccgtcgaggcaacgtacgaggagcgtcggcgggcccttgagggtgccgtcgaccagaatggcgacccgatcgagccggtccggtacaacgtattcctcgtcacgggtcagtcgcgcccactcttgtttcaagacgagcttgcgactgacgctgctgctccatcgcctacccgccgactcttcagagcccttctctgccttcgaggagcgtcacccagagctcgtcgcgatcgaccggcacggccggccgcagcagaaggtcgacctgttcgagaaggagcgccacgagaactctgagctgacgtgcgctcgagaggtctcgcctggcttcatcgtacgtctcccgactttctcatcttgacgaacgctctagtttcggcgactcggggctgactcgcgttattgcgcagatgggcaactcgaccgactgccccgtcctcaacagcgtcggccgcgagggtggggacggcgacgacggcatgggaggcgagaatcggctcggcattgacgtctgcatcgaggtgcgtctcgaccggcttccgggccagctcaacgcctaaagcgaccaagactgacgatctcctggctttgaaccaggccttcgacgacgccgagatgcccgacacgagccggctccggcacgcgagtcaatacctcgcctccctctcgccaccgggctcccgccaggcctcctcagcgccgtcgatcaagcaggccgacctgctcacggatgctgcagcctcgctcgccctccactcgccccaccacaaggcctccttctcgctcccgccgacgcccaagccagagggagacgatgcgagcatgtcggactcgggctcgccctcgccagaccacaagcctcgggctggccagatctaccacctccagtgcatcagcacgagcctcgttgtccagccgggcgactggcgtgcgctcaacggcctcgccggtcgtgttgtcgactttgtcaagtggctcaagtcgaccgtcgatgacggccggcgcgtgctcgttcacggctacgacggctacgtgagtcccggccttctccctttctttgattcttcagctgacactctgcctttctgctctccctcgctgcagaccgagacgagcatctttgcgctctcgtacatcatgcacgcgcacgcgctcacactgccagaggcctaccttcacctccacctcgccgccggccggtccttctttgtctacccgcacgacctgccgctcctccggcggatcgaggaccgcattgcgaccgacgcccgagcgctcgcctcgcaggggccgagcattcaggcgcagcactcgcccggcgcagccagcagcagcagcagcgcaagcagctcgagcagcagcgggagtggcagccaaaagtggaagagcatgctcggcggctggaagctcggccactacggcgagggctcggcgacgacggcctcgcgcgcggagcaggagcggcgcgagcgcgaggagcgtgagctcgagcgccggcgggcgcacgatgtctggttcaacagcccgtgctttgagggctcgctcccgtcgcggatcctcgacttcctctacctcggcaatctcaaccacgcgagcaacccgccgatgctccacgcgctcggcatcacgcacgtcgtctcggttggcgagtcggctctgctcgacccggcctgccacgacgcgaccccggccggtatttacggcggcggcggcggcgccgcctcggcctcgcccaaccacgacctctggtacgagcaccaggctggccggatcaaggtgcttgatatgcagtcgatctgcgacgacggcgtaagcccgctccggccgtgcatcgcgctcgcggtcgagtggatggagcgcgcccggcgcgagggcggcaagatcctcgtccactgcaaggtcggcgtctcgcggagcgcgaccgtcaccatcgcgtacgtcctgtcacttttctgcagcgaagggtgccttctgagaggctaactgaggctctttgacccgtcaagttacctgatgaagcactgcggctacacgctcatcgacgcctacatgcgtcagttttggatggcaccggcgcaatctcctctcctcttcgtgaactgacccgcctgctcgtcccacagtctgccgcgcgcgtcggctcaatgtcctgatccagcccaacctcaagttcatgttcgagctccagggttgggaaggtgcgtccttcaggcttgcctggcggccgattctcgctgacccccgtgcctcttacattcgacccagttgagctctcgcgcgagaaggccgagctcgagcacggtgtccgcatgacgcgcaaggccaacggcgaggccgtccccgagggcccccgccagcacggcaccaaggccatgtcctggccgattatggccaaggagatggtgcgtcaggttctgatgaccgacgtggcactgctcgacgggcgctgaccactagccgctgcctttccccgcaggccatcctcaaccaccgctacctcggcggctccctctcataagcgagctctcgcactgcacgccccgcctgaaaagctcggccggcaggtgtctcgctcgcatgcaaccgcggcgcatcccctcccttcctcactcgtctgctccggcgcccggtttccctgcgcggctcaccctcgcctagccctgtcactgcctgtcctacctacccttcctgtacactgacacccccgctctcgtccttctcagcctgttgtcgccatttcatttacctgtaccgctcacaccgtccgtccttccgcccgcccgtcctgccttccacacacacgaacacttctctcgcctgctcgaccgaccgcctctttcgtccctgcttgtgctccgttcccgtcccgtctcgatcgcccgcccgctccctgtacaagcccgcccagacatacgccctcatgccctcgtcccgaccctctctcctgcgacacctctgatctcatgcccccttctctttctttcaggctcgagatgcgcatttagagtagacttgcttccgactcgtgtttggtcgaacgaggcgctccgagcgctcaaaggcaaacgtcgaagcgttgcagcgcagcccgcgctcgccgacgggcgccctctccccatcctcgacgccgggctggccttgcttccgggtcgctgcccgccttccagctgacctttctcccgcccatcgccctataaagagccaggctgcaggaggccttggcccgctcactttttccaccctccctccgcccaatcaacccctcccgcccgcagcacacccgccatgcctaccatctcgccgaccgcccttgccgagctcacaggctcgcacaaggggccggtcatcacctcagagtcggtcagtcgcctcctgatgccggaccatctgccgctcgaaatgctgacgccaacgacgacctccctccggtgctcagccagagtacgactcggccatcggccgcttcttcaagtcttcggtcctgccagccggcgctgtcgcctaccctctcgacgaaaccgacattaagacggctctggcctgggctaggactcacggcgtcgagctcgtcgtcaagggcggcggccactcggtcagcgcggcaagctcgaccgacggcggcctcgtcgtcgacctctcgcggtgcgtccgtcgctgcgtctgtcccttggccaagtctgcctttctgacgtctgtcgccgtcctctacagctccttcaagacggtcgacgtcgagccggccacgtcgacggccgtcgtcggtggtggcgccaagtggggcgacgtcgaccaggcggctatcaagcacggcctcgccgtcgtcggcggcacaaacgacgacacgggcgtcgccgggtgcgtctcctcatgttggaaaagaccgagtctacggctcgccttttcgctgactctgccccttcgtgcagcctcacgctcggcggaggcttcgggtggcggtcgtcgagcgacggcctggcctgtgacaacgtcatcgagttccgagtcgtgctcgccgactgccggtcggtcgtcgtcacagctgacaccgagcccgacctttggttcgcgctccgtggtatgtccttcctccacttttcagacatcggaagttacagcgctgaccagactctgcaccgtcgacaggaggcggcgggagcttcgccgtcgtaacgcactttgtcttccggctgcatcctcagcggcccgacgtcttcttccaccagtcgatgcacagccacgacccactcaagcttaagcagctgattgacatcgttgaggccggcaacaaggagggcgatgcacgctcaaacatctcgatgggcatcgtgcccggcccaggcggtcaggtgcgcgcaagtagttcttcatcggcaccccaagctacagactgacttcgcctgtctgagcgccgcagtctgtcgttgtcgcgctgggctacttcaacggcccagcaggcgatggaaaggctatgttcgcgtcggtcaacgacctaagtaggttgacgttgcatcgaggcaaacgcgcagctgacctacgcctcctttccagagccgctgatggtgcacgagatgatggtcccctacgagcagctcaacacttgcatgaacgccgcccaccctcccggcgaacgctgctacatgacgagcaaaatgctcgtgacctttgaccccgagctcatgctggaggtcagcgagcggcaccggcagatgaccgaggccagcccgggcttcaagctggtcagttgtcgacaccctctgctctggtcagagttccgcattcagctaaactcatccggcctttcgcccctgcagcaagtcttgtgccagcctttccgcttcaaggtcggcagcgccatcgcttccgacgcgtccgccttcccttaccggtcgccacaggtgcgcatgaccctcgccagcgtgtcaaggtaaggagactgacccgctgcgggttgtacgctaggtctgcatcgtcgccttcgtcgtcatctacgagcagcctgaccagaagaatcgcgcgcgcgaccttgcccgcgagttgcgcgacggcccgcctttggccgaccagcccgacctcgcgctctacgccaacgccgacagcggcggcgagggccggcttaagaacgtctatggagccaactggccgcggcttgtcaaggtcaagcgagcggtcgacccgacaggcctccttggcggccggcagctgctcgcggccgaagcctgaggctatgctgcgcgccggcgccgctgaccgtacttttgcgtccacgcctgaaactatgaccccttgcctcgaaacgaaacgggttgtacgagttgacaggagacatagagatacagccgtcgatggtgggtccaaaataagaaacagttcggccgagaagtttaagggggggtcggagaagccggcgcgcgtgcaggcgctctactccttggtcggcgcgccattgtcaaagcgccgggccggcgcgtcctcgtgctcaaagtgctcggccgcgcccttctcggacgcggtgtagcccttgcgctcgcggaccttgagtgcgtacttggcctcggccgagagctggacgccgccctcgttgtcgatagcgtgcgacttgtagggcatgcgcttggcgatgccgacgacgtcccagggcgtcttcgggttggagtgctcgaaaatgtcgtcgatctcctccaatgaacgccgggccgtctccgggtaaaggacgtagaccgtggcggcaataaggaagttgatgatggcgaaaattgcgtaagtctttagtgaaggagggggcgcagggttgtgtcagcaccgagctcttcccctcgtcccgacactgcacggagacgcacgtaaaatccgatgttgtcgaacctgggggagggaggttgtcagctagccctgtgtagtgggaccagcagccatgttgacttacatgattggcgtgagcataacttttcaaagaagggcgtcgtacaagcattgagagtcagtcgaggatgcgctgcgttgaacgggacaagtggcggctcaccgatcaagctgcgtggcagagaggggtgtcagcgcaagccctgtcaagtaggggcaacagagtcgctgggagggctcacaagttaaagatccagttggaggccgtcgagagaccgttggcgggggcgcggatgcggagcggggtgatctacaggaagaggatgggtcaacactgtatgggctgccgggcagccggccgacgcacctctgccgggtagagccaggtcatgccgagccagccaatggcaaagaacgtgctacaagagacaatcggaaacgaggtcgtcagcctcgctataaactacgagctcgagagcgacagagccgacgaacttgtagacgaagagcatcactgccgcagcaaagccagctcccttgttgtcgaggccgttaatgggtccgatgccgcgctcgacgacgttcgtctcggtggcggcatagatggtgccgcaaaggacggccatcgaggccgacatgccgagggcgccaaagatcatgagcttgcggcggccgatccggtcgatgatgaagaccgcgatccatgaggccaagtggtactcgacaccgttggcaaaggcaagaattttggagttgagggggctcaagccgatgctggtctcgtagaggcttgctgcgtagtaggtgacgagattgatgccagagatttgctgtggcgaggcggcgaagaggatcagtacgaagacatcgccagcagcagaggagcgagcgacagcgcacctgcatcatctggttgaagaagcctgggaggagaggtggccagagccgggtcaacactctgggctttccataagcaaggggcggcgacgacgtaccgaggcaagcgcggtggaagttcttctccttgccggcgttggagaagatgtccttgagcgagccgccctcgacgagcgggagcgtcgcgcggacctcctcgacctggagcatgacgttctcgtcgtccggggcaacatcctcgagcgcggcaaagatctcacgggcctcgtcgtagcggcccttcttgatgagccagcgaggcgacctatagagcgagcaaggggatcagcttccgccagagcgatggtgaaagggtgagtgacgcactctggcatcgacatgaccgtgcagaagatgatgatcgcaaagatgactgtgacagcacgttcggcggtcagcgggcatcgatcaaaacgttctgcgtcgactgctctgaatagtacacactttggaaggcaattggcacccgccatgacgcctgcagatgcggtcaaggcagaagaggagtcagctctggctgctgggaaagggatggaaaggcaaagcttcgacgtaccgaaccagggacgaagtagaaggcaaggtcgatgccgtacgagaaggcgacgccgcccgtgatcaaagcacctttacaaagaccaatgatctgggtgagcgtctcctctcgtagtgcgtactacgcttaaagactgccactcaccctcgatcatgacgaggtagccgcggtgctcggcccgcgcgcattcggattgccagacggggacggtcgcggtgatccagccgttgccgatgcccgagatgattcgggcaatgatgagctgctcgaggtggtaggaagctgtctggatgatggcgccgatgatcatgacggccgagccccaccagatgagcttgcgtcggccgtacttgtcgccgagccagagcgtcgagagggcgccgatcatgcagccaatctcgtagagtccgatcgtcaggccctgagtgtttcagagagctcgtcagcgagcagcatgtggagtcggcggcagtgacgggctgtcgtacctgcatggtcgaagcgtccgacttggcggagccgcgcgtgttgacgacgtcgatgcgaggaaacgtctcgacaaagctcggcagcgtcaagaggccgcccatgactccttggtcctgttgaagcgcagcgcagcgtcagccgctcgaactcgtggtaggaagagagaagggaaggggaagtacatagccgaagaggaagaagccgaggccggcggtcgcgaggatgcctctgtgaagagccttgccacgccagccgctgattgcagagaagggtcgggtcgggtggtcagcgacaggtcgaatatcgaaggtgttcggcaagagggtggtcggcacgggggcgcacaaatagggcttcttgccgctgtgggtcgccttgggtgactcgacggtcgaggatgctggggaggcggccatgttgcctgctgagcttgaggaggagacgagagagttgacgagaaagagaagaccggctgaccggcgcgagcccggtcctttgaagggtagcgacgagctcgcatgacggcggacccgcgagcggagaaggagcggggtgcgacctttggccccgccggtcccccgacgagctctcgtgcgcgcgaaagcgagttaacagccggaaagaggttcgagctcggtcggcggagctcggcggcgaagggtgtggcgacccgatccatcggcccggtcgcagccgacgtcacagctgcaccgcgccaggcgagaagcccaacccgcgtcaacctcctgcccggccgacgcttaccgcccacccagcccaggtcgcgctacgaccaacgacgagaggaaagcgtggggtagagagctagtagatgacagtcagtcaatgtaggcagatcagcagcggcggagtcgggtgagtagaggacgaacgctgtccgacgcgagcccgaaggcgagacggaccccgtcgccggggttttgccctccagaacgggagagcgccggcggcggccgatggagcggagccgtcagtcggatgcttggcttcgcccgaggtcggtcagcgatcgtccagctggccctgtcgcgcgaccatctctgcgggagaggttgtgcgtgcgagtctccagaacgtcgctaagatgctgaccatcgctgatgagacttgcagtgagcgtcgaaggaaaagacgggcgggcgcagcggtgggctcgaaggacgcttcggcacgtcctggcttcggcagacaagccaaggctacgacgacgaccgccgtcttgcacctaaccatcacccaccacctgcagaacaccagatccatctctccggatatgggtcagtggcaggccgcgctcgggatccgtgacggagggcgatgcgatgctgacggccatcgcctcccgcaggactcgccgctcgccttgccgcctcgacgccgatcgtgcttccacctgccgacccgtcggccgctcctgcgcctccgccagtgcacgccgcacctcctgccgcatcgtctgcgatgcctgccagtccgccatcgtacgaccagtcgacgacgcaggaccccttccgagatgcagccgggtcctccagctagtgggttgcccgcagagtgcgtcgtcaccaggccttggctgacggcttccgctcgatcattcagccagccacctctcggtgaccagaagatcgctccggtccagcagacaccggtcgaccagtacgctccggccggcaggtgagaggcgcttacgatctaccagcggcctctaatcagcaggcggctgacaccgctcgaccctccgcccctgaaccgaccgcagcagcagcttccagccgccccagcgccagaactcgatcatctcgaacgcgccgagcagctccagtggcggcatcgaacgcaagccgtcgcttttccggaatcctttccggcgcggatcaactcggagcgctgggccgagctcgtccacattcggcacgcagcagcagcagcagcagcggccgctgtcgacgtcgtatgccggtcagacccagtcgtacgctcctccgccgggcatgccgccgcaagcgacaaagcagactcaggtagcgattgacagatcgatccccaagacgggcgagttccgcctgagcgagtgagtcgtttggatccggccgtcgagctcggccctgtctgacgcggtctgcccatccgataggtcccaggtgctgtccattctggagtacacagtacaagaccaagggattggcgccttttacgaccagcgggcgctgcagcggatcgcaggcgaggtctcgcgcttgtcggcgctcaacgccctcgccgtctcgtggtcgctgcctcgggagctggccgccgacctggtcaagattgctctgtttgacgtcgtcattctggtcgacgacaggccagtgacgacgctgggtccttcgctctcgttgaacgtaggctgatgtcccttctcatgcttcaacagtggctcgatggcgtaagtagcttctcgctccgccgcatgctacctgtgatgctgacgagcgccctcatacctgtcgcagcttcgaggaggagggttcgagaatcgatgacgcaaagctcatcgtcgagcgatgcgctctcgccgctggcctgtttgacgatgacggcatccaggtgcgaatacgtcgcttgtgtgccctttgagcgtagcacgtctgactctcgttgccgttcgcgtcgaccacaggtccgcttcctaaactccaagtacgtcggctaaaaaccatggaaagagagggacgaggagcggccgctgatcaggcattcgtatattctgcagcatcgaaggcaacggcatccgcgactcggccggcgcgctgcacctgatgaatcaggtccgtttcgcgggcctcaccccgctcgggaccgcaatggagcagaagatcctccacccgctcgtcgtccggccagccagggcaaaccgactccccgtgcgtacagcgcagcgcccatactcgccgaaggctgccgctgacgaattttcaccccattcttgcagaagcccgtgctggtcatcgctgtcacagacggcacgccacagggcgagcctcgcgacaaggtcagcatctgcttcacctcccgcgaggcgacctgctgacggccactcttgtacttcgcttcagatccttcgtgtcatcatgcaggccagcaaggagctcgagggcacgcgctacggcgccgacgcgctcagcatttcttttgcccagatcggcaatgatacacgcgcgcaagagttcttagcctcgatcgacgtccatccgattgtcggcgatcttgtcgactgcacaagcaactacgtacgtctcgatcgacagcatgtgctgaccgacacgggtgcaagactgacgagctccctccttctgatccggctcacaggaacttgagggtgcgcaacagacgtctctctgcgcagctttggccgcaactgactcacgctctgctccccacagccgacgagatgatgaagacaagcggcatcgagctctcgccgtcaatgtggatcatgaaggttcgtccgtagcgcctcccacgttgtgttggctcgccaggctgacagcccgtcatcgccgtgtcgtctaggttttgatgggaggttcgtcgatctctacgcttacctcctctgctctgttctgacactgacgagctgccgtcctctaggaattgactcgagctacgacgcggccgacgagtgagctgcgcctgctcgaggccctgggatgacgagaatgacgactgtagccttaacgtcgagtggatctgtacaatgtcgcgttgccgacgagagctcgatcctgaaagagcgtcttaaaatacagtcaggcaggccggcgctactcggtctcgagcttcttcccgtcgtcgtccgtctggatcatgccgatctggagcatgttgcggtaaacggcccacttttgagcatcggttccctcaccaacgggccgctcggcatcgtctttagggagaagcgaaaggtcaaaaaggccggcgtcgcccggcgtgtgagccggcgagtgaatgaacggatgggcctcggtgttgaggacgtaggtgtcgagcgagagctccgatggttcggcctgcagcaggtagtagtacttgaaggtctcggccagctgatggaggccatagaaggagatcagtcccagccgtctttgggcatgcacttcaacggcgacttacgacgaacgactccatgttgtcgccgagcaaagggttgcgtcgcccgacgtccttgacgctgccaaagccgtgatcggttcgcgtctgctcgatccagtcggtgaacatgcgccatccttggtcctggtaccgctcgtcgcccgtgatgcgatagaggtaaaaaagggacctgttcaacagagaaagcagtcgagagggtcagtctgagcgatcaggagccagagcgcgaggtgaacgtactcgagcgactcgggccgcgagatgtagtgcttgtgcatgctcttgacgcccaccggatggccgcgagggatgtcaaagacctcctcggtctcatcgtccatgattttctcgaatcgggcaacgttttcctgtccgaggcatcagacgtcgtcagctcgggccaatcaaggcaaggaggtagcgggtcagcacggaccggtgcgtagaagtcggcgcgctcgggctgaagaccgctctcagtagccgatctgcgaacgggaacaggtcgaatgacaatcagctccacctgaaagaccgacacgaggggcgtgcgcacccgatatagtagcacgtctgcgtgatccgcttggcgttaaaaaggtccttcttgcggtagtcgagggcctgagacccgagcgcaagcatagcgccggtgaagcacgacaggtgctccatcgcgtactggtagcggccacccttgacctcgccgaccgtctgcaagatggagcgcaacctttgattagccacctctaatcccgcgctcaagaagattctggcgagagcgcacgagaaggttcttgccagggaccttgggctctcggaacagaatggctgtcgctcggtcaatcgattgagagtactggcggcaagaagtggtgccatggtgagtaatcgaaggacgatttgctggcatgcagcggggacgtaccagctgagcgtagcgaggtagcgagccacgaaggagcacgtgtctgggatgagagcgtcgcagttagctgcggaaaccgtcagtatagcaaagtctggcgactgactgcttgatcaggtactcgacggccgagtcggccatccctccgaacgagtacgtgcccagcgttcctcccctccatgtctcggtgctgaacattgtcggcaggagaggtgggaagggcgacttgggcgccaggacctggtcgaggtagtccatgccgcgctgcgcgaggtcaaagtatgtccggttgccggtaagttgcgagaggcgcgtgtactcgagcgcaagcgttccagcctcggcgagctgaatcgcgtgacccttgtagttgtgcttcggctccttcgggttgatccggcctgataaagatgtgatgtcagctgtcagacttcaccgtctgccgcggggcgggacggaagacacactgagaggaacgccggatgaggtatcaaagacgggaaggatgatcttcccgagctcttcggctcgcctgagcagtaacgggtcgccgctcagatcgtaggcgcccaagagacctcccaggtatctatcgaggccgaagtgagaaaacaaattagagcggcgcgtggagcagggtggtgagacggctcatcatgcccgagaacgcaccgaattacagtctcgaaagcgtgaatcgaagcaccattccgcccgagctgggcggggcctcggccccagtcgatgccagagatgacgccccagtcgatgtcgcggacgtgctctcgagctagcaagtactcgtctggcagacgcatcaggagaagcgtgtccagtgagctgcgggcgcacgtttgaggatcagcctgcgacagataacgcgtgcggaagagcaccggctcgactcactcgacgattgttgcgccccagccgaggaaggggtccgacctgtaagggcaagggtcaggcgcgagacgaaggacccgctgatggtggcacgcaccgcttgcccgtgaccggcttgacctcatcactaccccaagcctgcctcttgtagccttcccaggcatgcctgtgagcgttgcgcagggcgtagtcagccagagaaactcgtcgcgccgcctgcctgctgcgcgaagtgcccgactcacagaaaggcgttgcgaacgacctcttggcgagctgtgacgaccttgcggcggtcgacttcgcgctctgcttccggcgggaagtcaaactggatccgaggcaggtcgttggccttgggcttgtccggtccgaatgagacccagtcgggcgcgacccactctcgcgcgaaggtgccgtgaggaggggcccacgtcccgccggccggagctgccttgcccgtccactcgtctggtcggatcgagacgagcagctccgccgggaacgcatcgaagatcggattctgcgagcgaggccgctttgcgaagagctcaaacgtcgacgggtgccggagcgactctggcggtgggaagtcagggggcagctcagggaaaagcgacgacgcattggccaccctccgcggcggctggcctggcccgtgcttgaccggcgcgccaggacggacgatgcggtggacaaatggttccggcggcggcgaggcgtccatggccagcaagggcgccaatgtcaggccaaagacgacgaggacgaggacggcgacgccaaagaggagcttgctccggcgcgcgccgcggagcacggcgagggtcggcatggtcgtcatggcggcgagcggtcgagcggaagggagaggcaggagctgtaagtctgcctccttgctctgaagcagtctagagagcctatagtgccgtgtctggcaagaaggcgatggtcggtcgggtcgaaaaagccagagctgaagcccaaagctcggagggaacgcgcgcagcggagccgacggacgatcttggcgtacgcctgcaagtgcacacgagcggtgtcatctcttcttccaaagtcagtcccagtgtggtacagctcgctgatcattcacgtaggcgctcaggttagagcgcagaatcctatctccgtcaggggtcctcgctaaagggcggtagaagagtcgcgctgtcgctcagatcgtataccggtcggtgtagagcataggcccaagagaaacggcctagctcgctgcagctagaggcttgctttgtcgagacagactgtcctctgccagtcggtcgtcttgaaagatagggtagatcgcagggatggggtgggcgaggacaaccgccagtcagcccaggccagtccagctcgcaggcctgtccctccttcacccgagcagccgtgcccagcgacttctgtgatgcgtcaacgttgtcatctctgttcttcctgcgtgccctgatagcaagatggcgagatgggccggatgagccgtggccgttagagggggtagggctgcgcctgggcgcgtgcttcggtcgaggctgcgagagctccgcctgtattcttgcggcagacgctcaactcggactctctcctttccagcttgcaaccttccttgacgatcggtcgagcagcagatcccgaaccgcacgacgccttatcgagccgaccatgttccgcctcggtcgtcagctcgcctcggccggtcgggtagggctcgccgctccgacgccgggtgagcttcttctgccgcgagcctgtccctgcttcctgtcgctcaccttgcctccggcccgctccaggtcgtcgggcggtctctgagcttgcctccaatcaagctgggccctcggcttcctcggcaagctgtcagtgattccctcgtttttcgatcgaacgctcaggaagccttgagctgaccctcgcgacccccccccttgccttcagcagccgacgctgcgtcgacgtcgaccagcctgggctaccctacgctggtaagcctgggccaggactctagccgccgtacgtcctgctctcagctaagagaactgtctgcggccgggctgactttgggttttccaggctatcttacgaggccgacggccgcgtccgagcccctcggccgccgcgtgccgaccacacaggactaccctcagactcggcgagaatctgttcgtccagaaggtgcgttatatctcaccgtgtccttctctgacctgctctagcttcatctgacgctgcagcttgttcgacatcgacagcccagccacggcaacggagctcggcgttgggcggaaaggcggcagcgaacaagggccgcttcaggtcgaacccctggctcgcccggtcgaagccaaaggacggcgtctcatacagtacgtgctcttcatgtgagagaccctccatgtgtccgctgaccatcgccgcctctcgccttcgtcagctaacgaccaggtttttgcctatctgagtgagctgccgatcccgggctgccttccctgtctggcagcgggactgacaattgccatctgccgccatttctccaggagatgacattccttctgacgcaatcgatgtcctgacgtcgaacgacggcgactctccgcccggcttcgacccgtcaacgccgtcaagcgccgctgcgctgcgccggctcgcacgctgcatcttcaacagccggcacgggaggaagcctgtaaccggcgcaaggctcagggcgttcattaaatacgtccttcggagggagctgcgcgacccttgggtcctcctatacgcgatcgcgatcatgtcgggccagctggcggaaccgacgcttctgagcgcgctcgaggccgccgttcgtgaggggcgtgacggctggcccgaggcgcaggccaagcacgcgttcgagtcgggtccccgtctcaagcaggtgatgctggcagagctcgatgagttccggacgcagctcgtgggtccctccctctcctcacgcggtggaccacagtcgacgtgaaagctgacgcttcgactcattcccgccgcagccgctcgacatccagctctcttgggatcccatccttgagcacaaaaacgcgctcgcgcactgcgttcggctcatcaacttcctcaactcgacctactttgcgcacgggagcgcgaacgacattctcgcattcatcaaccccagccggcagagtgacatggacgagcacccgtttggcgtcatcttcctcctcgaaacgctccgccaggccaaggcccgcgactcggtcgacggccaggccggcgccatctatgacgcaactgtcgctctcctgccagagctggccgagccctggaagcagacccgaggcctcgctttcgacctccgctcggtgacgcctaataaccgcaagttggccgagaagcatgtcggggtcgtctatgcggccgccgagacgtacctgaccggctcgctccgcgatgagctcggcgaggccggcctcgagccctggatccgggcaggcttcctgagtgcagacggccagtccgccgatgctgccatcgaggccgaccggtagcgcgatgccatgatcattcaagcgacacgacgaagggttttcacgggctaaacgcgagtgggccctgctgacgacgctgaccgctcgttctgacactcgaccctcactctcttctgcgcacctcgccgatgatcgactcgaccttccgccagtccgccacccggtcaaggctcgctctctcgtcggccccgccagtcgtcgaccggtcgtcgtccgcgagtcctccagcgtggtcgtcggatgcgacgctcgacgccgtcttggctcagcatgcccagccctccgtcagccctcgtccgcgacctcgtcgcctctttagcaactcggatggtcgggcttcttcgggtgagactgggagctaacagcccgctttcgtgaacgggactgaccgtcctcgttcgcgccccgcgccctgcagggctcggcgcgcatacagccgactggtcgttatcctcgaacgagccgctggaccagatattttttcggaccggcgagcgaagccgtcaagcccggagcctgcgctcaagctcgccctcaccgccgtcggcgtccttgttgaagcgttcagaggaccggtcgatcgagattgggccttgcgggaaaccgcgtcgtccctcgactcgcacccttcgcttcccacctctcgccgagcttttggcggcctaccccaaggcgcacgagtctgtcgaccgcttcttggcctgccgattcgtcaaggatgatgcgcttgtcgagacgctgtctgatgggccagccgtcgacggaatcccgtcggtcgtcccacgcggcgcgctgctcgcagccatcctgtcgctcctccgggcatgacgcgtctacagagaaagaccatgtcaattggctctatggtcgtccggcatactgccaagtgatacacgttttacaaaaacagcggatagggtggataaagctgaaccatgaagcagcgagcgagtgaggatgagaaaggcgccttcgtcacgcctcgacgacccggaggacgcaaggctgcgaaggatcgccgttgcggagctggccagcgagaagggcctcgagctctcggtcgccgacaatcttctcgcgcgtgctcgacagctgggcggttgcgagcgaccaccggtcgggaagctcgagctgcgtccgccggagcttggcgacgatcttgctccggaggtcgagcagcgagtcgcttggtccgaccgagactgagattgtgcgctcggccgaggggatgaagatcttgaagattttgctgccctcgacgctggcgccgccggggctggcgagcgatgccgctgtcgccgaccgaggcagcgtcgtcgacgaggcctcgggcgagatggacgacgcactgtgcgcactgtggatcgagggcagcgtgctgaccgagagcgagggagacttacggaggtaagggttgagcacgccctggtgcggccggtggtaccggaagccgtccgggctggcctcgaggttggccgtcggcaagagggagcccttgcggggcgagggtgagcggccggcaggcaagccgagcgagctgccagacgagggcaaggccgagacggacgagaactgccgcgggccggttggtagccggattggatcaccgaggctgagtgacgactcggccttcaatagggccgcgaaaggccgttcctggtccgggttgccggccgtagaagacgaaggtggcggcggcggaggtgctgacggcggaggaccgctcggcagtggtggcagcggagccgagggcggggcctgcagcgggcgacggctctgcatcgatggcagctgcgtcggcggcggaggtggaggcgtcttgggtcgccagttggcggtggccggcagaggcttgatgagtgtccggggcgaaacaagctcgtccttgccacgccgcagggcgtcagctccgatccggccgtcgcgaggcgcctggtcgcctggcatactcgcgcttgaaacagacggccgcgcgccgcaaccctcggaggcgctcagaggcgtgagcgggccggtcgagtcgcgcgacgaccgagtcgaagagacgcgaccatcagagccgtcggtccggcccgagtcgcacgtcgagaccgacccccggctgcgggccgaccagccggtgctgacggtcgtcgccagcgtcgagtcggtctcgcgcgagagggccgacatgcccgagtatgtcgacgaaggcgtcagcgacgcttgtcggagccgaatctcaatcgccgtcgggctctggggcggcgtccgggctcgctgatgacctgtcgccggctggcgcttgaccatcggcggcagcaccgactgcgccttaggcggcggcagcgggaagttttccagtatccacttgacgtcggcttcgacaacgccctccgagtcgtagagcgtctcggctggcgagtcgtgttcgggtcggggcgtcgacgtctgactttcgactggcgccggcacacgcggtgttgcctcggccaccagcggctgggtcggctcctccgcaaacgttccgagccgggaattcgagtatgggccaacgccctcgtacggtcgacgctgagactgttgctgctgctgctgctgctgctgctgaccctgctcgaagaagcgctcgctgcagcggctagaagagggcgagtggaactgcgagccggcgtcaaacggcgagaagcgaccgaggtcgagcgagaagttggggtcgataccggctccggcctcgcctggcggcggcgcttgcaggcccgaggatggtaacggcggcgagggtatctggaccggctgaacgggcaatcgctgctcgtcgaaccgctggaggcctgggaagtgccggagtcggcagccgtcgagcgtgcactcgttttcgacgggcacgccccagcccgggtcaaaccagtcgcggacggccgggtcgtcgtccctccgctggcggatgattttgcggagaaggccatcgaccttgtcggtgtaggtgtcgagcgtctcggccgcaaggggcgagccgccgccgccgccgcctccgccgcccgagccaatgaggcccgacatggacgagatggagcccgacaggctcggtcgcttgtgcatgccccctgagccgttcgtcctcgcccggccggatgccgacgagagcgacgagcggaagccaagcctcgagccgccgtctgagctcgctgccaacgactggcccaggccgctatgtgcgtgagctgcttgagctaccgacagtaggccagcgtatgagataacctgccggccgggaaagagcgacgagagctgctcgaccgaatacgggcatcgttgctgcgaagggggttagaagccaaggagagaccgagaggtaaggttcagtcagccccagggcttgagcgtcgatgtagagcaggtgggtcgccgcgacccgggagcttgcacgggcccaaggccgagaaggcggatgacggcacgtacgatgatccagctccggtcgtcgatgtctttgcactggatcttgagcagcgggcagggcgacggcttcctgcgtgacctcgagggtagaggcaggagctgaagcgatgagagcggcgcctgcgaggccggaagcggggcggcggcgacctgatcagggcggatggagggagatagcgcgctctcggttagcatcggttcgagcatacgcctgcttgttagggaaaggagctcgacgtacggccatgtctgagaggaaggaaggtggctgaagaaggcggcttggcaagggtgcaaggtcgagagggggtgcaagagccgccggctagccgagtcgagggctgaagggatgacggccaaggcggttctggatggcgatctgaggtgcaaacgttcggccggccaaagaggagaaagaggaggcagggctcagggctgaggtctggatgaagagcgggtcgagcgatttgcccgagaggtggctgggtgtcggtcggtcgttggagggaggggacggaggagtggcaagggaggacgcccacgtcggagagccgcgctgtcaagttgccgaggtcggtatggccgtgggcggcgtttagagtggaggaagacttcttgctgtctctgcaaccgagcgggcggcgagcctgccgcttgcagaggaacacggttcgactgcgcgcgctgaaacctaatagatcggaaccggcgcgcgcctgcccggtcgccgcgagcctagaacctaggcccgaacgaaataatgtcgcaggtgctgtctaacagcaggttagagtcagagtctagtcaagcgacccaacgacgacgacgactctgctggcttactctgcgctcgaagctgtcactcgagcggcaggcgttggaccacgcgaccgagcgacgcccaaatccatgacgacgcgagagctctaattgaaaaggcgcgcgctgatctatgaagggcgaagcgtacgtccgcagcgcccgccgctcctcgaagcgcatgccagcgtcgtcaagacaggcagaaagcgacatatgagacgagggagcgatacaagggcgagagcagggaagggtacgccgagagaggcgccggccaatggctgatagcgccgagctgcagtggagagctcgtcgaccgacgcccaccctaggcattgacctcgacgagcccgacgccctcaggcccgaccccctcgtcagctgccgaagccaacgggagggcagcaacgccgaggccgccgtcgtcggagccgaggacgaggcctccatgctggctcgcccaggcaggcacggccgtctcctcggtcagagcggctggaccgcccgccgccgtcgtcgtcgtcggtgccgtcccgctaggcttaaactgcctcgtgatccacgtatgccgctcgcccgggaccggccagccgacctcgatccgccagctcgtcttcgcccgaagcctgacgccgagcccaggccggtcgtccagcgcgcgcgagacggtgagcgcggcgtgctcggtcggacagcggatcgagcagcgcaggtcgccgagggcggggccgtgtgcgagccggctgaggaagcgcgcaaaacggtcggtccggtcgatgtcgccagcgaggaagacggtgacgtctagatggcgggcgagcgcaaagcaaggggagagatgttggtcacgctgagggcgcagacagcggcacgacgcaaagacatagtcgacgcacggtgtgacttgagcggcagatggagcacggcgctcgtcggcggcgggtgcgttaggcagaagacgagctccgagctcgtcacccggaagcgcggccaggcccgagcgacggccggaaggacgattgtcgagaggtggtgctggtgatagctgttagacgagacggcttgttgtcagctcttgttccgtcggcatcaagaaacgaggtaacggggacgtacatcctcggattgaggttcgggtacgtcgcccagacgctcggctcggtttgaaatacagccgatgcgccatccgcctggccattctggacctcgacggcagcttcgtcgcctccttccgtctccggcataagggcgacgtaggcttggatactcccagccgaccggtggacaggcatcccggcgagccgaccctcggccgagtcggcaaaccgcaccttgaggctgtcgaggtcctgcaagccggcgagcacgcggccccagctcgagcgcgggtcgcgccaagacccagaggggacgttacgcaggacggcgcgcttaatccagctgcgcagatgcccggtccgctcgttctcggctgcgttattgtcagcaggcttgagcgcgcggccgagaaggtcgtacgaccgcgctgagccgagcgagaccgacttgtagagttcgggctcagtgagcgcgtgccactgaaagcggccgagccagaaagatcgattggtcagctattacgagcgcacgagaaaggcgacgacctgtccttacgtctctgcacacgagcagcagcgaccagcggctcgctcccgcctctgcacccgttgacgacgacgatgcggacgccccccggccggcagaagcgacgcgcgccttgtcagcctcgcgtgcgcgccggtcgtcagctctatagagcgcgagcgtctccttgaggatcatcgcctggagctcgagcgggaggcgtgggctgggagccgagcggagcgccagcgacggcccgagttggagctcgcttgcagacgccagctggctgtcgggaagactgatgccatctgtgtcggttgaggagcgagggcttgggctgagcccgaagaaggtgctgctgctggccttgtcgaggcagatctgcttgtcgcccgccgttgtgagctgcgggccaattgtgctccaggagcggacgacaagtagcctgtggtgcattgaatcagaagagcagtcttcagcatgtcgttctgcaggaaacccaaaggaaaaggcgtccacgcacaggtcgtcgccgccactggaggtgctgagcccgacctgccggtgctcgagctcgaacgcgtcgagttgaaccagactcccgggcgggggcaaactgggctgcgtggaagccgacatcgacgccatcggcaggacgggcgatgtcgaggatgctggaacgaaaggctgctcggttcgaggtccgctggcggcgagggtcgccaggtcggctggagcaagcgtcgtggcgactgcgccgtccacttcgtcctgcgagacgtcgccgccgtcggcgacgctttggaagacggcgcggatcgtctgcctgccgtcagagagagcggtgctgaagaggtggtcgatcgtcattgaacagagttgaggtcaagggggcgaggggcgagggaaggaggcggaaggaaggggcgggcatcagtcagccttcgcgcaggggaggtctcgggctcagccgcgtcccgcctccggctccaatgaggcgacgcagctgactggcgggcagaggctaacacgaggagaactcacagatcacctctcatctgagaggtgcttgtgctgccaagggctgagctggcgtcgtttggactagagacccgccggaggatgaccggccggagcaggccgccgccgttgtcgccgagcaaggctgcaatagggtagcgtgcgaacaccgccgcctccaagtcgaaagcgttagagtccatcgctgtcgacgcgttgtagtcgagctcggcggacaggtcgtcgggcgaagttgagtcgctgcggccggcgatgccttcaccatcggtctcgtcggctgacggtagcgtcgtcgtggatccggtggcggcggcggcggtcgcaggaagggagctgctgctggtctcgctgcttcgaccgatggatgagcgagtgctcggccgtgtaagaatagtctttggccgtttgccgtgagagagcgccatggtcggtgaagatggcggttgaggaaaaggcggaaggtcggaacaaggtggctgcgagaggggtcgatcggtcggtcggccctccgctgcgcacgccggcggccaacttgcatctgcattttgcgactcgtcacgactcccacgcccctcgtcgggcccgctcggctggctcaccgtcgatcggcagcaaccaccatggcgtccttcctccggcgcaacaagtcgtcgacgacggcctcatcgacagcctcgcccaagcggccggccgatcagctccagcacgccgcctcgtcgccaggccctccgccgcagagcgcgattcccgtcgcaaagtcgcccaggctctcgctgcgcagccggagctcgcttcgggccgccctaccgatgcagacgggtgcggtcgtcgtcgccgacgagggcggccctccaatagagcagcagcagcagcagcagtccgagggcggcgagcagcgacgcaagcggcggacctcgctcaaggacctcttccgtcgatcgagtagcagcgggggcggcggcggtgcctcagcgggaccaagctccccttcaagttcgggacgagcgccgccctcgacgccgccctcgactggccggtctgcgcctctcgatactatcagttccaggacaagcacgaacggctcgccgttgcgggctgcagcggatggctcgccggccggctcctttcgtcggaagcgtgtcgggtacgtcgcttctcccttggcatgtgagacaagcagctggtcgctcgctcgcaaagaatccagtggtgccttctgctgcccatccaggctcgtctccggcttctctatgagacgaagggaccttatgagcgtcttgcttgctttgtgtagccgcatctgactctaaagctgtccctttgctcctagctcgaccccgggcgagggcgaggtcccgctctacctccggcgggcgtcgcaggcctcagtctccgccacgccgactacgacacccccaccgggcacgccctcgaccggttatcagcaggagaagacgacgcctcctcagccgtcgtttcttcaagcagatcggccgcgggcgtcctcgatcgcgagcacgaccctcagcggctcgagcgccgccgcgccggggagcgaccacctcgcctcgcacgccgagcaagcgacgacggcgctcgcgggagcgaccgcgcggggaacgtcagtcgattttggcctcggccggtcgccgagcgcgcatgccctcctccagcagacaatcgcaaaggcctcgccgccgggctcgccgacggcttcgtcgggcactgccgtgcgtcggcgcagtgctgctgctgcctcggcctcgacggcgcattcgtcaccgttcgctcctctgtcgccaagtggaggtcggacgcccgcgagtctgactgccacgatgcccgatggtcctccacaagcgcccgccagccgtcgtgacactttcggcgcgacattaccgcgaccctcgccgacaggcacgccgactggcctcggacccgtcctggccgctccgtctgccggtccatcccctccagcgaccgtcactggtcccgtcgagggcgagatgaacacggcgtaccggttcggtcggccgtcgcaggcggcgcacccccagccgcagtccctgtcggagcagactgcaccggcttcgccgagccgcatcgcccggccgacagcaacttcacgtcgcgagactgacgacactgcttcaagcagcgttcgccacagcggcagcagtagtgctggacggcttgcgatcccccggtcggcagcgatcgagcctgccgagagccacccggtgcgctcgccccagccgggcgagccgaccaaggattcggccagcagcgcggcccaggcagcggcgacgaccgcttggtgggcgtccggcccgctcccgccgacacgagccgaggtcgccgcattccctgtcccgccgccgacgccgccggcgagctcgacggccgagggcgacgtcctccagcgccaacagcgccaggacgaggtcgtgccgcccgtccggccgacgccaagcccgacgccatcctttggcgcactcgagtcggaagcgctcagggccgaagcgggcgcgctcgatcggatcgccgacgaacgtccgacgttcctcgacttgccccacggtctccggcggccggcgcagggggccgacgacctgtttgcgacgagcccgccgcgggcgctcgaccgcgctctgccggacgaagacgacgaggacgacgttgcggccgttcttgggctcggcagcggctatagcagcgagggagaccgcgacgagctacgcgacgcagcgtccgacctgcctctcatctcgggcgaggtcgacctctcgtcgccaacgctcggagggctatcggaggaggaggcgggcgagggagaaggaccggtcggggcgacgcacgccctcccgccgacaccgacgtttcctgggctcgacaccggcaagcactctgtgcccagttcgccctccgtctcgagcccgccgtcgagaaggacgtcgtcttacccgtctccgtcatcgacagcctcttccgtccgcggtggcggaagcgatggcctcgccccttcggccctggcggctgtacgagcgccaggtgcggcctcgccggtcccctaccacctgccgtcgcgcaagcagtcgcatcagtacacccggtccgaactgtcggagctcgaggcatccagcacgctttcgaccggaggcagtcgaccggcgtcgacgacgacggcggccgctgcagcgccttccattgccgacgttttcggcctcggaggatcggcgtcgagcaagccgcgaccgacgtcaatcgttgaggaccagccgcagggagggccgtcgacagcggccgacgtaccggtactcagcaccgggccgagcgacgtcgacgtgctgattgcgtcgaccagcatgccagagcagagcgagacagtcgacctcggctcgggtcactcacagacaccgtcgctggcggagccaccccttgagatcgtctcatctattgcgaccccttcaacgctctcctcttccgccttcgacgacggcaacgcctccgacggccttctcgcgccgttcgactccagagcgccaagcacttcgcccggcgcctcggaagagctgtcgtcgcccgtccagatcctcgaggcgctccggctggcacgcgtccagggctcgccggtcgtctcgcgcgtctcgagcagggcaccatcgcccgcccggtcaacgccggaccgcaccatcggcagcgcgctggaggccactgtggacgagccgcgagcgccgagcccggcttcaccaacgccggaaccttttcagcaagggctgccgtcaaacgaggtggaagtcgacgtcaaagtccccgcagcgcccgagtcgccgcccatcgacccgccggccccgctctctttttttccctcgcctgtcccggccccgacggctgccgaagatggcggcactcgaccagcgacgtctaccagagtccgctcgagccgtcgaccaccctcgccaacaccgtcctcgtcgcgctcgtcaaccccgacgccgccctcgcccctccagataagcacgccggccgaccgctcacggccgctcctctccgtcacctcgcccctgcctcacctcgtgccctacgcgcccgtcccgtggtccctcctcccagccggcctgcgcgagctcgtcgaggcgcccgagctcgagctcaggcgcgaggacgtcgtccgtgcggccgatggcgcggcgcgtgtcgtcggcgccggcctgacggttgcgaagtggggcgttggatggtgggcgatcatcccttaccggaccggcaagtgggcgcttggcaagtgatggccgacttgtcgcttgcctcgaggtgcgtctgtagccggctccccgcttgcttgctgcgatgttgacgtcggtcccttcacctcaggcccgtcgtccgtcactcggtcatcttcaactcgacgcccccctcgccccgccggcgtcgccgctcccatctcgtcgtctcccatctcgatcttatccatgcacgccttcgcaccctctgttgtttcgatcagaagggcctcttcggtcatctcgtccctcgcttctcggtcgcgaggagtcggccttccgccctgtacggacctggcgggctgtcggtctcatgacacatgtacccatgattctgtggtctgcgtccagcacccgcgcttccctttgtcggcagcggcgcgcgccgccgcatgcctcagcaccctgtgagagcaacgttgcaagtgcgctcggtcataacgtgcaaggcgcggcgagccaaggcacgacaagctgacggccaactcgaggcgtcttcgtcatcggccccggctgggctgagcgagccacgtcgcagcgagctgcaggctgaagcagacgccggcgtctcgcacgcaagccggcctcgacggtcgccgccgtctggcgcgtgtcagccctttcgcccacgcacacctgcagcgaacgaggggcaggtcggctgctgctgcggggcgggctgcgtgggacggaaaaaaagggtgacgcgcacgcccgccgtcgatcggctgccgggccaagccgggcagcaggaaacgacgcgtctttccctttcttcttgcactcggaccacgactgaagacaggacggaccgacctccgagcagcagcagcgtcttcccaagcagagcctttcccggtactgtcctccttggtgtcgtcgcctgcggtcccaaccgtctagagccctgacttcgtgcgtgcgcgcggctccaacgcccgtcgcgtgtcttcgtttagagcctgcccgccgcccagcaacgaccagccagcctcctgcctttccacctcggcgccacggacaagggagcaagtgcgagggaggaaaggccgcctgtatcgcccatctcgcctttacaagagggttgcctttctctgcgtttaccctgcccacttgacgccggaccgacctcagctcgcccgcccgcgtcgcgtcgcgtcgtcatcccggccccgtctaccgctcgaccggcccacccttccctctggcctgcccgcctctctccctctccagcgccccaacacccgatgctggacctccgctcgccgaccaaggccgactaccggaggcacccgcaccacctccgctttgcctcccagcccgacgaccagcgcccgccgcctgtgccggcgcaggcgagcaagccagcctcgagctcggcccactcgtcgccgatgctgggcggcgcgtcgtcgtcttcgtcctcgtcggccgcccgtctcgcagagcactttcaagcccgctcattctcgctctcgacgccgtcgccgagcggccggccaccagcgagcttccagccgcgcgtgctcgacgacgtctttggcagcggcggcggcaacggtgtcgacgcggcgcgggtggatcatccgggctgtgtaccgagcggcagcgacctcgccaccccgaccgccggccatctcggccagcgctcgccatcgtggctctcgggcgcgacggcgcacgagcagtcgttcccgctgtcgagcagcagcgcgtacctgcccgcgccggccggccggagcagcaacctcccactcttctcgcccttcgacccctttgcggcgacgtcatccttgagcgcgacgacaacagcggccaagtcgcccgggctgagcactgatggcatgccgccgccgccgacgccgtcgacggcctacatcgagtcgctcacgcgcgcacaccgaggctcgttcctccgctcgctctcgtcgacctcaagctcgtcatcctttagcgcgagcgggccctactcggccgacgacgacgacgacgacgaccggctcggcttctccgggcggccagcacacgagctcatctcgccctcgggggaaagcctagccgacgtcaccgacttctacttttcgtcagacgccggcggcgcgcgcgacgacgacgacgaggagatgatgaccgagtcggacacgaccgagtgcgtcgatgcgcggtcgagccagctgctaagcccgacccagagcgaccggtcgacctacgccgagcagctacgcgaatacacgctctctgtccgtcctctcagcctccctcgcgccctcgtctcctgcggctgacgcttgctccccctcctcctcgttgcgacggcagatgatgcaatcgatcgcaccggcagcagcagcctcgccaatcaaagtcggccagtcgacgttggcgacggcagcagtgagccatcagcgccggacgtcggtcgcgagcgacggcgccctatccggcgtcggcatgcggcgcgcgcagggcgcgcgcgagaatgtctttcgcaatgtcgccgtctaccagccgcaagaggaccctctctagtgatccttcccccaccttgcctgcccttgggcttcctacacccccggtggagcctcatcgtttcttccgcctttctctcctcacgacccacataccccgtccataccttgcactacatttggcggtcgctgatcccgtctgccgcctaactcccagcccatagatcgacctcattccccactgtagcgcttacacacccacacacgcgagcaccgaagctggccctcggggccggccgggtcgcacgctccatcggtcccatcaagctcgcctgatcggcctcccacataccgcacgcacacacgacctcttgccctcttgcctgtctcacgaaccctgatcactctacacagaccttgtccgaccccgactccttcctgtaaccgcccccttctcgccccattcgtttacgcctccgtcctctctttgttgcccgttcactcatacacgcacgcttccttctttcggcccggcccctgtctatttgcgctgaagtgatccttgatggacctctgcgcccgagctcgaaccgccatgccttcctcccgcatgctttcgctgatcggcgcaagaggacgcgctctaaaggcagtcatcgcatctaggttatcccaaaggtctaaaagagagagagagagcacgcctgcccggtctacaggccttgaaggccgccgttggcaattttggcgccgtccttgctcgtcgacgtaaagtgctcgacggtgccgtcggcaaagacgcgctcgcgagcgacccaggtgaacggcccgccgccttcgttttgcgcgaggagctcaaagccgacgtgctcgttgaggacgacgtgcttggccgcgcgcccttcaggggtgacaacgagctcgttgacggccgccgtcactgcgcgagagaaggggggaagcagagtcagttacgcgtcaagcaagaccggacacctctgcgacgtacagaactcgccgacgggcaggtggagccatcgctgaggagcgctgaggcctgggaagccgccctcgaaccagccgaggtggccgcccgagccgacgatcgcaaggacggcgtgcgacgacgccttgaacaagtcgagcgggagcatgtcgcccgggatgatggggtcgtcataggcgttgagacagagtgtcgggctagagacggtagatagcgagtcagcgtagcgacaagagcgatcgcacgagcaaggcggggcccacattttgatccccggcaggcggtgctttgggctcgcccagttgtagtaggcctcggcgctcgggaatgggaacggcgggctgttgccaccgacctcgcggacgacgcactcgtcaatctcgcgcagaagaggccgcttcatcttcgcgagtgtcacgacgtgcttgtacagaagcgagtcgggccgggcgatcgggtggatccagctcgaagcgtcggcgccggaggacgaaggcgacggcggccgggtcgacgaaggcgtcagtgcggctggaggcggcggtgagctgatgatgcgccggtagatgttaagaatattcttgcccatcgcctttgagtagacgttgcgcgagaaccaggtggcgtcgagcctgcggctcatgcccgggcagtcccacggcgcggcgacgacgacgccggccttgaggacgcagtgcgagccctcttcgccgatgaagcgggcgaggacgccggcgccgagcgagaagccgcagccgaggaggggcgcgtttgggtacgttgagtggatgtagtggatcgccgagcggtagtctgacgacggtcagcagaggtcgaggtcagtttcgagttgaccgaaattggaagggaggtcgacgcaccattcgtctggcctgcagaatagagctgagccgacgtcacaggggtgttggcgcagcctcggaactgcaatgggccaagggctggtcagcgaccgtctgaccatcagaggtcagcaaggggaccgacgttgacgacgcagccacgcataccgaggccgcccttggccttggagagcgtcacatagtggaggacgttcctgagagaagaaaacaagctgtcagccggcaggcacccagaccctgtcgttcgatggcgcggcgcacctgacgtagctctcgtaggagccgccggtcaggccgtgggcaatgacgaggatcggcgtggtgtcgtccgactcggcctgagtctcggcgtcctcgccccggacgcggtgatcaagcgagtcggggttgtggacaaagtcgaggccgagcgtgccgccgtcaggcgtccggaggagcgtgcgggagtaggtgatcttgtcaatcaggctgaaatcgcccaagacattatagattgtctgaaggtggccgttgccgagccacctgatggagagcagatggctcgtcagcaaggcagccgaccgataggtgagcgaatcggacaaaccagctcggcgtgaaggtgccgcggaggctcgggcaggcgtcgaggatccactggcgtcatcgagttcgtcggccgagcagcgaggtcagcagcgatacctggcagacagctcgccgaggaggtctgacagacctggtgggcactgatgcgctcccttgcaggctcgccctcgcggtcgacctcgaccggctcaaagtcgtctggaccaggcgcgaggaggatctgccgcggccgtctggcgagtgacggcacgaagctggcgaggaggcggaagaggccgcgggtccgggcaaagaaaccgcccttgggaacgatggccatgctgcgggcgtcaagagagaactgtcagagtgagaggcgtcgttcattcttcgtttcgtcggctcgaccgggcgaggtcggcttcgtcgtaagcggcgccggaagtgccggtgcgagcaggccaaacgaaggtcggaccaaccatcgctcgctcgcctcttccatcttgccctctaccctcgaacctactcgagcagcggtccactcggtcgccagcagcgcagaatgtctcgcccgtcgtctaaacagctgcttttgacctcgtcaaaggcgatcgtcaagctccaacggcgcaatctcgccagtctcaccgccgccgccgccgccgccgccgggccgctgcagcaccaccagcaccagctcctcctcctcgctagtcagcagcagcagcagcagccgagccagaccgcatcgggatcggttgcaggcggctcaagtccggcgctcgtcccgagcagcagctcttcgggcggggcgccctcgagcagtgcagcgggctcgtccaaggcaagggcgactgcgggctggtcggccgtcatcgagggtccagcccagcagccgactgccgccctcttcgacctgacggcgccggcctatcgaccggtgtcgtcagcagcgtcgcagccggtcgctttgtcggcggcggcggcggcgggatcgcagcgagaacaacagcaccggccttcgacgcctccgccctcttcctccgcgtcactcctgcccgttgtggtgccgccgacggtccgcacgcgtcgagagtcggcatcatcagcgaggccacctacgacctctacccgcgagcctgcctcgatcgcccagcagccggcctcgccgacgcaaggccatgctctgccagctgcgtcctcagctgcctatccgtacggcccgccgcgcgcgctctggccggccgacggcccgacaaacgccgccccagcccacgtccggccggaaccgtcatcgcggctcgtgttcgagacgggcgcgtttggcatccccaaggcagttgcctacgttccctttacgtcatctgcgaccagccccaagggcaaggcgcgagccgaccacccgccggaaccctcagacggcactctggcccaggtcggcgaagacgcctactttgtccgcgcaagtggctttgtccacgcactcgggattgccgacggcgttggtggctgggcgaagcggaaggacgctccgaacgccaacgctggtcgcttctcgtcgctcctgatgggccacatctcggccgaggttgcgcgctcgtcggccggcccgtctctgcttgtcgccgactgggccagctcgcgcgggcttgacgtccctggtcaaggcgcgggcgatctcgatcccgtcgtcgtcatgcagaagggctacgagcgctgcctcgagcaggcccggcgcgagggtctccagggcagcgcgaccgcgctgctcgctctgctcagtgaggaccagctccggatcgccaatctcggcgactgctgtttgacgctcatccgcaacggcgagatcttcttccggacgaccgaaatgcagcactcggtgcgtctcgacctcctcttcttgcctgacgtcggacgctggtctgacactctttgccgtctttccagttcaaccagccgtttcagctcgggacaaactcgcgtgacagcccggccaacgactcgctcttctactcaatcgcggtcgagcacgacgacattgtcgtcctctgtaccgacggcctgtcggacaacctgtttgaatcggaaatcctcgaggagatctcgtcgttccagcgcccggcggcagcgtcggcctcaggctctcggccggtgtcgccgatctcgccgtccggcactgcaccagcccagacgtcctcgccaagtcagagtgaagcatcatcagatcgccctgcttctcccatctttccgtcctcaccgccgcagcagccgtcctcaccgccgccgaggtcaccgagtgacctaccgttctccgcccagcggatctcggaagccctctgttcgcgcgctaaagcccgatcggagcagacccgccagtcggcatcaccaccgctgccggcgcaatctggctctcacactggagatgcctcgcaacggagcgcgtcgccccccgaggcggccgaccggcgagactcgccctttggcgtccgcgcccggcgggaaggtttccggttccatggcggcaaggccgacgacgtcacggtcgtcgtcgctcgtctcaaagccctagacgagggcgctcagccatcggcgtaccgtctttgaccgccctgatcgaaggactctctcccctcacccccccttccccgttgtaccctaccacgcccctgccctgtcggcaccgcccccaagttctgttgatctccctcaccactcgccgttgtacttcgtcccgttcacccctcgggcgtctgcctgccccctcgccgttgtctctccgcgtccctctccatgaccgggagatgtacttcgagccagcgagagatcggctgctgctgcgcgggtgctctcgccgacgcgttcagccccaagacgagctcgtcgactcccatccatccaccatctgccctatcactggccccaatcaacccttgctagtccagcgagtcttgactgtccgtcattctcatctaagaaattcgactaaaaccgtggaaatcctctctgccatgccgagctcgcctcgcacgacggcaaggacgtcgttggtcgacgtcgtactctggctcctccctccagcggtcacgaccctccatgccgtcctgagtcctttcacaaaggtcgaggagtcctttacgcttcatgcgctacacgacatgctttaccgcggcttctggccgtcgtctgaggcgcgttcgccggaccatcggccttgtagatgctccccagctcaaccagccgggactgaccgctgctcgtgcttcttcagtgggaccacgtcgacttcccgggcccgctcccgcggagcttcatccctgccatcatgctctcgctcgtcgtcaggccggctctctggctagctcagtgggctgttcgcggcatggccattgccagctggaccaaggcgtcggcaggcgagccggagctcgacaagttcgtcgtccagattatcggtgagtttggccttgtgcagcatctcctcttgctctcagcaagcctccgctgatcccaaagattgcagcccgaattgtgctcggcctgctgtcgtcggcgtcgctgctctatgtcggccggcaggtgcgcttcaggcacggcctcaccgcgcagcggctttacctattgctctcggtcacgcagttccacctcatgtactacgcctcacggacgatgccaaactttatggccctcccctttggtcagtccgatgtacgaggacagtctgacagatgtttcagcctggctgaccaaaggcgtctccgcccgcagtcaacgtcgccttcggcctcgtcctgagcgccgggcatggagcggtgtccaagcggtcaagggctcaatgcgatgggctggcgctgaccatcttggctgcaacggcgacgatcgtccgttccgagcttgcctgtctgctcgggccgctcgccctcgcgctcctggccaagcggaggctcccactcgcgcagatcgtcggctggggcgctctaggcggcctgggtgggacggcacttaccgtcggcgtcgactcggctttctggggctactggacctggcccgaggcctatggcgtctatttcaacgtcttacgcaacgagtcggccaaacagtgggggacctcaccctggtcgttctacctcaagcacctgccgcttcttctgcttgccggcgcaccgctcgcgctccttgccggcctagtccgacctgtccggcggcggctcgactggatcgtcggcgtcttgcccgcggtcgccatggtcggcgccatgagcgccctcgggcacaaggagtggcgctttatcgcctacgtcgttccatggctcaacgtgccggccgcggtgatggctgctcgactgtgagtcttttggctgcgtagtcagtctgctggatctgacctgcttgcttgcctcaatcagttggcagacggcctcatcgcctgctgtcgtccgcctgctctcccggacgcttgtcatcggcgcgcttgcgcttaatgccattgcagcagggggcctgctttggatctccatgcgcaactatccgggaggcgacatcatgcgaggcccgatagcagacgagctgcgacgctttaacggccattccggtgcgttccccggctgagcacttgaaagcgcgtcaggctgacccttcttttcgtcacagtccacctctactcgccgtcactgccgcttcagaccggctcgacgctcttcctggtcgatcctcgcgaagccgcgggcagttcgtgcacgttcaacaagaccgagtttgccgacccgctctcgcccgagtatgcctcggcgcaggctgcctggacgcacgtcatcctgccgagcgggtctgacgacgagattgcacactggacggccaagcgcacgacgggcggtcccttggagggatgggacgaggtcggccggacgagcggctttggcggcttcgacctccggcgcgggccacccgcggccgctgtaggtcgtccacgcgggccctggatcaccttcgaccctacgaccggcttcggcgcaggctggggagcactcggcgcgacggttcgagtgcgggagggcgagcgctgcgtcctcgtccgtcgccgcagcttggacggcctgtaacaagcggattagcactgatgaggtcgggaaccagcgagtcagccttcactcgcctcaccttgctcagcagtccctgttccctagccctgaagagctcaagtgcgtcgtctgctggcgcgacttgcccgccacgcggccgagccgaggtcggagtcagaatttttcggcgcgcgcgcgagccgttccctcaagaagcggcggtctgcgctctcgccccttcttcccggttcggaggggggaaaccacacacctaccctccgaccttgctctatcttgcctcttgtgtcttctctctcttcttctcctgtgacgctctaagagacacacgcccgccatgcccagctcgacctcgcccattgccccgacgacgcctggcgccttcaaggacgtcagctcggccgtcgccgagcttaagacgtacagccggggcgacgggctgagcgctgccgagctcgtgcgtcttaggacctagaattagaggccggtgcgacaactgacctctccagctcgctgcctgcagatggactcggagaagagcggaggcctgacgtacaacgacattctgatgctgcccggtcacatcgacttcaacgtacgtcgctcgctcaatcagtcagccgacggtagcatgagtctgctgttacgacgtgccgagctagatgacgacgctgacaaggtcgtgaccctctcgacttttcgcctcgcctcaggcctcggaggtctcgctcgagacctagtgcgtcgcctctcgggcgggcagctcagctgcaggcgtgctgactgtccctggacaccactaccccctcatagcatctcgaagcgggtctgcctcaagactcccttcatctcgtcgccgatggacaccgtcaccgaggccaagatggctatctcgatgggggtgggtccgcgcgagggccttcttcttttgcgtaccggaaactaactcgtttccgctctcgccctgctgctcctcccagctcctcggcggcctcggcatcatccaccacaacaacacggccgagcagcaggctgccatggtccgcaaggtcaagaagtttgagaacggctttatctcggatccggttgtcctcggcccagaggcgagtgtccagtcggtcctcgacatcaaggccaagctcggcttctgcggtgtcccgatcacaggtcagtccctcgttgattcctgtttcttcagggccttagcctgactctttgcctttgctctcgcagacaccggcaaggtcggcggcaagctcctcggcatcgtcaccggccgcgacgtccagttccgccagccgtcgacgaagctctccgagattatgatcaccgacgtcgttaccgcgcccgtcggcgtcaacctcgaggctgccaacacgatcctccgcgactcgcgcaagggcaagctgccgatcgtcgatgagcagggccacctcgtttcgctcctggcccggtccgacctgctcaagaaccagaactaccccaacgcgagcaagaagccgtcgaccaagcagctctactgcggtgccgccatcggcacccggccggccgaccgcgagcgtctgcgcctcctcgttgaggctggtctcgacgtcgtcgtcctcgactcgtcgcagggcaactcggtgttccagatcgagatgatccagtggattaaggagacgttcccggaggtcgacgtcgtcgccggcaatgtcgtcacgcgcgagcaggccgcccagctcatccaggccggcgctgacgggctccgggtcggcatgggctcgggctcgatctgcatcactcaggaggtcatggccgtcggccggccccagggcacggccgtctacgccgtcgccgagtttgcgcgcaagtttggcgtcccgatctgggccgacggcggcatcggcaacatcggccacattgccaaggcgctttcactcggcgcgagcgccgtcatgatgggcggccttttggccggcacgaccgagtcaccgggcgagtacttctaccacgatggcaagcgcgtcaaggcctaccgcggcatgggctcgatcgaggccatgaaccacaccaaggcctcggccgtcaagacggctgcgaccggcgacgacaatgccgcgacgtcgcgctacttttccgaggccgactcggtcaaggtcgcccagggcgtttcgggcgacgtccaggacaagggcagcgtcgagaagtttgtcccttaccttcacaccggcctccagcactcgctccaggactcgggcgtcatgagcatctcggccctccaggccggcgtccaggacggctcggtccgcttcgagcgccgctcggcctcggctcagatcgagggcggcgtccacggcctcaactcgcacgtcaagaagctctgggagtaatcttccttgcttcgcctttaggcatccgcatccggcggtccgcagccgggccgtcgttctcgcgctcttctcctcccatttccttgcactccttcacgacccctattgttctctgctccccatcgtcatggccctgcactgttgccttcaaaaccctcgttgacgctcgagacttcagtctgcgtgatggccgcatcagcgcattttatcgtgacccgcccgcctttgacctgagccagcgcccgagcttgaccatcggccggccgaacggcagatggtgcgacccctcgggtccggccccgagcccgaccgcaccaccgcatcgcaaccaggcctcagcgagcggggtgccgacgtagagaaggactgtccacgtccagactcgcccgaaggggccgcagacgcgacggcccgtcacgcggcggaaagcctcctcggccaggatcgcgaggccgctgaggagaaagaagtcgaacatcctcactgcgagggaccgatcgagcgggtcatgcgccgtaaagtagccgaccgaatggaaaaggcccgacacgaagctgaagcggaggggttgtcggggtcagcaagggctccgctctcgaagtcagcgtaggacgtacaaggtgccgatgacgcctgctagacggcctccgacgcgcgccggcaaccggtagccgctgaacaaaagcgttgcgaagtagagcttatgccagcgagcgccccagaggtcgctgacgctctctgccgcccaccaggagcggaagagggtcgggtagtgaagctcggtcgtccgccagttgggtgagaggagggccgaagcgaaaccgacgagcgcggccggaaacgcctgggcgaggtagagcgccgtcgcccaaccaatggagacgagtgtcgcgctcgccattggtggcaatggtgggaggagcgggaggatgagaggctcgtagatcgaggcgttgcgtgccgacgctatcctcccgaacgacggatgcagggcgaagagcccggcgagagcgtcccacaagatgtaggagcaggcagctcgactaaagtgtttaagaagaacgcgccggcgtgagcgggggacctttgggacgatgaaacgcgtcttcgagggtccggtcgaccagccgaggcttcggtaagactacgacgggcaacagagtcggcagggaacggggacttcagcaatcattgcgcagatcagacggcaaagacagaacgcacgtaggagtagctgagggccagagagacccgtcggcgccagctatcggccatgttggcctctctacgccgcttctcgcgaacgtcaccggcgtccgtctcccagccaagccaaacgggccgttccggccgaagagccagctcgacggccttcatggcccagtagatcgcctgcatcgacaggcccttgttcttttcgccccaggcaacgcctgcgtgtcgaaacttgaagccaaggtagagcgtcgccgcgacggctggcggggcgagtgccgcccggagccggcgcgtcggcgtcggtgaaaagaggaggaaggcgaggacgaggacgggaacgtgagcgatgaggttgatgtagaccgtgttgtcggtgatctctaggggcgtgggtgtcgaggctgctaggagcttgaagagcggcttgtgcaggcgaaaggtcgtctgatggagagcgtccatcgtctggtgcgaggggagaaggagggctcgtcaggcgagcgactcgacgggaatgctgcgaggctcacctcagtgaagcctgtctatgtgtgcgatctatccttgcttcctctcctgtcgtcaaggtccgtctaggcgtcttgagggtgatgatggtcagaggaggaggcgagctgcttccgcccgctcgaccaggaagggcggctgcgcggacgggtcatgctgagagctctgcaggcggcggcccaagtgcccatcaatctctcaagacctgaagggttgccgatcatgctgtccggtcacctgggaacgtcgtctcattcgagcttgtctttgaagagagaaggtatcatgaggaagcaaggccagcgtcctggcggcctggcaacgtcgctcttcccggcgcttttcccctctgttgaagacctcctcaaccaccaccacgcctcaaccctgcctcctctcggccattctccagcactaactgctggtccgcgcaggctactctacaggcgctcacggccaaatccctcccatcttcttacgccagccgcaaccgttcggcccagccgcttccgccctccagccctccctctctgcccctccccatggacgccgccgcaccgccgccgagcgacgtcgacatggcgcccgacgacctcctttcgcatccggccccgctcgcctccgacctgacgatggacgaggacctggccgctcccgcgtcgaccgacgacggcctcggcgcagagcagatggctgtctccgatgacgacgacgagggcggcgagcaggccgagctcgtgatggaagacctcgaggctgccccgctcgcgacggacgccatgcagctcgagccgggaggggacggtgccgccgttgctgtcgccgtccgcgacgtcagctttgaagtcgaaggcgaggtagccgacgtcacgcccgaggtcgaggtcctctcgcagacgtcgccggtcgggatgaagagcctcccgctcctcccaccgacgacattcgcgatcgaggccaccgaggtcgtggccgaggtcaaccttccagaccctgctgctgccgcgccggtccctaacgtggcaacaagccaggttgtcgaggctggcgaggcgacggctgcctcgccggtacctgaaagctttgtgctcgtcgagctcccggtcgacgcagaggagaacggcccggcggaggacggcggcgcagaggaaggtgagcctccgctttgctcgtccatggctgaaggaaattgcgctaatctgcccgccttttgtttagcacctgacgctaacgaagccgcaccggcagacgaatctgctgctgctgaggacgtagaggaccatcttgaaggtgcgccccaggccacaactccccacagcgaacgaaccgcgactgaatctgtccatcttcttgtcctgcctcagacccgtactccgaaacaggcgaccatgcccacgacggcggcgactcgtcgtccatctcctcctcgcaggccgacccccgtccggcccccgacccggacgcggagacggcgctcttccacgtctctgagcgttcgtcgtcgatgcccgtcacgatcagctaccagcgtatcaacgtcgaggccggctccgacgcgctcgagacggtcacttatgcgctcttccagccttctgaccgcccatcgtcgtcgaccgcactgccgctgcgggtcatccttgagtcgcaacagagcctcttcagctccaagctcaccgatctctttgacgccctgcgtgaggaggcggcatttgcgagcgagccgggagtgcttgcgatcgaggacgaggagggcacgcgcgagtgggtgctcgagcatgtcaacgaggccatctgcctctcagtcggcgaggtgcgtcccctctacctctttttctcgtccgaaccccctgttgtccgtccctcctgacctacaccctcaggacaacacctctgcgcgcgaatttacgcttgccgaccttgctcacgttcacgccttgtgcgacctgcccgagccgctcgcgcttcgcctcaagccgggcgacatccgcttcaagcagcggatcgagatgatcaagggcatgcgcgacgtcatggacggcgaggagagcgcgggtgacatcaacgagctcgaggacgaccagatgacgcacgacgacgcgcacgagctgtccttctctgatggcggctacgtcgacagcggcgacgacgacgaggagcccgaggtcgcctgtttgtccatcttctctcgctagctgggagcttgtcgctgactggatgccgacctggctcccctcgcagcccgtccagactatgagcagggcgagggcgacgtcgaccagctcgccgacgagacggatgacgacgagattaccgagattgcgcccccgactgccggacacgctggcgagacggcacccgcagaggatttgcaaggtgcgcctgtgctccggcggtggccgaatcaggccttgatcggccggctgacttttcgacctccttcggcagactaccccaacgggcccgacgaccctgacattccgttcgagcaagtaaacgacgtacccggacacgaagtcgaggttgggggcgaggatgctgagggtgcgccccgtcgtgtcaaccagtcgcgcagagcgtcgagctgaccctaacgtgtttcgcagacgcgaccgactttgccattgacgtagcgcaggacgcgccagacgagacgggcattgccatcgactccaagattgtccagactgccaacggcgaccttgaggttcctgcggccgctcgtcacgttgagacgaacctcggctccttcgacgaggctgaggccattcggcaggatggcgagaagacctcggcggtcgagacgattgcaggcgacgacgccgcgcccgagatcgtcgagtccctggaagaggcggcggcgctggcgcacgaggtcgagctcgaggctgcggccgagtcgactgccgggggcgtcatcgagcgggtcccgatccctgcgcaatttacgcatgcggcaagcgacggcggcgacaacgacgacgacccagaggcattactcgtgattgagaaggaggcggcgactgatggtgcgtccatccttctgcccttccgatctcgtgcgctgctgacctctgcaaacgctcttcgcagactcgagctcctcaacgcaggcgacgaaacgcaagcgggctgatcgcgatgcgaccgacaagaaggccgacctgaccgcgaagctcgctcgcagcgccgaggacgagctttacggcgactcgcccgctccgacgcccgtgcctgcagcagccgaaactggatcgaccgagatcatcgagctcgaggctggctcggatgcggacgaggaacatgcctcggatgtcacgctggccgacagcgatctcatcgtaattggcgaggaggaggacgcgcctgaagcggccgatgctgacgacgcaggcgatgacgaggaccgcggtgagtatcctttccttcccgagaggtcgaggcagctcgctgacgcttcccgtcccgcaacagacgccaagcgccttcgcgcagactgagcggctgaaggtcttcgcaccctcgtcaactcctgcccgtcatgcgccctcactctccatggcgaccttcactctcgacggccccaactctcggcggcctttactctcgacgagctactcatctactcggatctctcactgtcgcacaacgccacttttgcgtatccttgccgaggcttaactgtcggtcatcccgtcggctggccttcgctcgtcaatccggaacgacctctcagcaagcagaaattggtacgtgcgtctctcggatcgaacgactgaccgcgcttccttgcagcttcccgaatagccgtcgcgattgcgttctcgctcgtctcctcccttcacgacctcccacgctctgccatgcctcctgcaccacttttgccaatgatcccatgctgctctcatgactctcgcaattggctgcccaccgcgagcgtcgtcatcctcgttgcgcgagttccgacagtctgccgagtctaactctcgtcggcatgtgcgctcgcccgatgacccgagacgactcggagctgcgtcttccgggtgacttcgaagagatgccgagccttgttgagcggatcgatttgcattgctgtttcgttgctggatcttgatttcgccgccaaacaaaaaaggaaagcccgagcaatcatcgctgatcagcgccctttgccaggccggatccgactgttcagacctgtcgaggacctccagatgtccccctggcatcccccgagagcgcagacaacggcaggtgggctggccacagtctcctgcaccatcctatcgtcctccgacccgctttcgacccacttgaccggagcaaaaggcgcctacagaccgaacgggaatgtctgtttggcgacgaccgccgcctgtcggcaaggtatctggccggctggcccgctccctaactctggcagcacggtgggcccctctccttcggacggaccgtcgaccttccggaggagcgcgtgcttcgtccgggcgaactcggcgcgaggtcaggccaaggtctataaaggagagcagggcgagggctccgggtcggcgccccttcttgcccatcctccctcctcgccctcagcagcggcgtcctccctctagctccctttcgctccggcctcaacctcggcgcccacccttcgcaagcatgggcctcgatgccttccgtacgcgctacaatgccaagtgcgtcgtcttccttagtcgagcttgttgctcgtcggacctgcgagtcctgaacccggcgcttacccctttcgcactgtcgtcttcgccgcctctaggattgccggccgccaatatgtggtcgctggtttcgcctgtatcggcggcggtctcttcggtcttgacatctccaacatgtgattccgaggtgttgcctgccggcctctcccagcgactgacgttgctgctctttgctctcccaggagcggcatggtcagtaacccctactacctggcgcgctttggcaacactgtcatcaacggagctcctggcatcaccagtggccttcagggcggcgtcacggcctccatgcccgccggttcgtttgccggtgcgatcgccacgtccaagattgccgacggtgcgcccttcttgacactcgcctcgttcgtacaaaggctgacgcactctctcgccttgtgcgctccctggcagtcatcggccgcaagttcacgatcatcctcgccggcctgatctgggtcctgggaagcgtcctccagggcacggcctacagcgtcgcccagctcgtcgtcggccgtgtcattgccggctttgccagtaagtatgcgagcgtcgggagggcttctttgcctctgtcagcgctgatcgattcgcttctgccaatctgcgcagtcggaatgagctcggtacggctttcctacgcgcttgaccgcgtcgcctcacctctcgtccgctcatactgacagacggtctatccaccagtcgatcacgccgctctacatctcggagatcgccgctcctgctatcagaggtttgtcctgctgcctgtgctcgcgcgcgttcaacgtcagactcgcgatttgccctgacgctcgacgcactccccttcttcaggccgctgcgtctcacttcagcagtggtcaattacctggggcatcctcatcatgtatgctatcaccatcggatgcgctgagatcgagggcgacggcagcttccgcatcccttggctgctgcagctcatccccggcgcggtcctctcggccggcatgtgagacgacctctccaagtctgcatcctctgcctcgcgcccaaagctgaaccctggcttgcttcgtctccaggcttgcgttccctgagtcgccccgctggtgagtggcttgtgtgtcggtcgctagccggcgtcggcgctgaccttcgcaatctcctccctctcgctcaggctcgtcgaccatggccgcagcgatgaggcccaccaggtcattgccgacctgcacggcaagggcgacctccaggacggcctcgtcctgctcgaggtcaccgaaattgaggacgccgcgacattcgaccggactcaggccgctcggtcgtacatggacttgctcaagcccggcaccatccgccgcgtcttccttggctgctgcatccagatgtggtcgcagctctcgggcatgaacgtgagtccccccagaagtctgatcacaccctccgagcggccgtactgatccggctacgcgactccctcctcccaggtaatgatgtactacgtcatctatgtgagcctccaccccgtgccgctcgtcttgcggtggagatctcgtctgacaacatctaccacgcaatctcccaggtcttccagtcggccggcatcaccggacgccgtggcgagctaatctccacctttgtccgtgagtcctctgaccaacctcgcccgcatctgagtctgctggcctctcgagctgaccgccgacacgccctcccgccgcagaatacgtcctcaacgttgtcgccacgattgtaagtcctctgaccaacctcgcccgcatccgagtctgctggcctctcgagctgaccgccgacacgcccacccgccgcagcctgccatcatctacatcgaccgctggggacgtcggcccatgctctttttcggggccatcgcaatgtgcgcgaacctgttcatcgtcggggttcgttctttcatcacaggcgagggagcgttccttcgggcggggcttcccaatgcccggcctcctcctcgctgcctcaggctgacgatctcgacgctcgaatcgctcgccagggcttgcaagccggctttggctccgaggaccgggtgtcaggttctacgacctgtaggtcaatttcgtcgcccagaccatcaggcagcgtgctgatacttattccttctcatcctccaggggtcatcaagggcaacactggcgccacctatgccgtcatcgtcttctcgtacctctttgtctgctcgttcgccatctcctggggtccttggtccgtttctcctcgcttcgtaaactgctgctctccttgctgtatgctgacgcctccttgatcgctcctgccctcgacacagctcttggacctacccctcggaaattttcccgactcgcgtccgcgccaaggccgtctcgatctcgacctcgaccaactgtctgtccttgtgaccgacccccgtccgtcgcgcaactggctgaccctgcccaacacgacctttcagggatcttcaactttgcgctcgcttacgctgccccgaaggcgctcgagaacctccagtaccagtcagtccctcgagggctgccgttgctccaccttgggccatgctgacctagcctttgacctgcagaacctatttcctctatggcaccttctgcgccgctgccgccatccacgtcttcgtgcgtcgccccaatgctagccccttgtcggcctgcctgctgacgacattcctcgcccccccccccttcgcagttcatgtacccggagaccaagggccggacgctcgaggagatcgaagaggtcttcaactctggccacgagttctcagcctggaagctcaaggccgacatcggcaagaagtcgctccgggacgtcgagggccgcgggacggtacgacccccctcttttctcctgcgagggatgcgagcacgctgactgtggacgcttgcccttcgcccagctcgcgaccgtcggcaagacgaacggctcgcccacgctcgacgacgacaaggtccagtcgaagcacatcaactttaacaatttctaggcgtcgcttcctctctctggcgccctgtcttcagctacgacttgctttcttctcctggctccctccctcgataatctggtcttcctccccttcgcccggctccccccttactgtactgctcgacgtctgccttcacggctcttgctgcctggacattttatgccctgccagttcatcccctacaagacagtctgtaaagaggaaggaagaggcgagacgaaggcgcgggtgcgagctgaagggggcctggtccgacgggctccgctcgaacgagggagggcgccgaagttgactcattgaggccgtgaagcaggcggccgagccagagcaggagccgggtgagctcagcggtcagcaaatggagggtctcggggggaacgggatgaaagtcgacgtaacgcaaggaggcagcgggcggcagtcgtcgcccctgagcgacgccacaggcttgcccgcgctttttccgagcagcgcccggtcgctgagcgaaagttgtcttccctcccttccaaccttcatcatgaaaggcaagtcatctccttcccctcttcgctttctgcgcagaacgagtcgttaaccttcgcccttgcccacccctctctcagttaaccagcttgcggagacgcacgacgcctggctcctcgagttctgaagaacgtcggggtcgatgcctcatatcggcagttgaaaaagcgatgggagaggaaaaggctggcccgacttaacgcttccctccttcactggttggggacgccctcctcgggtttgggtcgggttggcgcatccgtcgtctacagtcctcggttctgctcgcgacacgcgaccgacggcccgtgacggcgtgacacgcctttgatggatgctgcctgcttctgttctgttgctcgtgtaacgcctgctctccgaaaaccgtcagcatgtcctcttcagtctgggagtgtcaggtcctgaggtcgggtcgctcagcccatcctgtcttgtcagtcgttctcgctgtcgtcgtcgcgcccggcagagcatcttgccctccgccggttggcccgaccgacctcgcgaccctcaactaccacccgcccttctgccctcgttccttcctcctcagtcacgacctcgctctcgcctcgcatgtcgctcgcaaagtcgttctcgcccgcgctcaaggagctccggctccacctctgccagtcgtcggcctcgagctccggcctccggtccgtccctccctcacctccctccttcgagtccgggctccttgccagcagctccagcccgccaccccaacccgagcgccacgctttcagctgacataacctcctaattgtgtccgaaagcggtttcatccagaactcttacccgaagctcaaggaggccaacccggaccttaaggtgctcatccgcgaggcccgtcagatccagcccaaggtctacgcccgattcggtgcgtcccctcctttcttaccttgctagctcgcacggccggctgagagctgacggtcgattgctggttggtctttggtcgattgcgcagagcgcggcgtcgagtcgtcggcggtgctcgagggcctgtcggaagccgaggtcggaaagacggtcgacgagctcattcagcgcggcgccggcgccagccggtcgtgattccccacctgctgcggctgggaggacgctcggaggagggaaggagggtgccgtacgggcgagcagggaggcgtgtaggatagctcatgagacctctagacggcccgcgagtgggacgacgatgacgacgggggtggtctctccgatccagcggtggcctgcctgctggaccgtatagcggccagggccggccgtctcgcccatggctgacctccctggtctcttccacacttgcgggctgatgggtcgggctaactcacgcgctgatacccggggaggagaggtcgctttccagcgggaccggccatcatctaacccgccccgtacggtgttcggaccgagccctgctgaccgaagcagaactgggcaacggctttcgacgcgctggcggtcatgcctctgctagacgatgacgctcgacggctgccaaggcgctttctgccatcagccccagctgggctagtgtgtggcaaggcctcacgaccgagccaccttgcgattgactcttgacagccggccaaagcgacgatgtctgatggccgatctgtgcctcgccgaaacgaacaggaggtcgctcagacgactctgtcgtgtcagcagcccctcacatcgtcggctctctcactcgaccctttcgtcggtccgagctggcgctcgctcgctcaacgacagtcacccagggcgggttgacgaaagggaggccgtcgttggcgagcaggcagtgggggccgtgagcggtcgtccttcgatttctttctccaggctgttgagacgtatccaagcggtcggaaagaggacgacgacgacaacagcgaacaccgacgacctcggcggcgcgagctgtctcgttcgtttgcgctccattcgcaatccagagcgcgggtctgagcttcttcccgatcggccgggagcctgcgttcctgcggaacggaagccagaagggaggcgagcgagcgggtcacggcggtttcagcgcccgtatcctcccctctccacccgcccgcgagcctttgcctcttgaatccgtccggttcagtagagtaaaacgagaggtctcgtcccgccgctccgtccgccggccgggcttgaaggaataacgcatgtagagaaaccgagggtcatgaagagataagcagagggcgagggcgggcggaatgggacgggacagccggttggcaagaggggaggggagggatgatggtacagctggggtcattatacgctaagcggaaggcactctcctgtcgcttctaaacctccatcgccttcgtcccctcgtcgtcggcggcgcccttgacggccgtcgaatgcgtcgccgaccacttgacgattggctcagccccgcgctgaacgctgtcgggcttcgacatgccggttgcgaggaccgactcttcgggcgtgtgggccggcttctggagcgtcttgacgcggcgcctgtggggcgagaggggggtccagggaggattagacgggtagtaaacggcgagccgccaagaggcggaagagagggcgggagacgcacttgtggagcttgccacgccagtgcgtctggagggcggcgtccgtctccatgtagcgcgcacactcgacgcagtactgaagcagaccggagagacgaaaggagggtcgtcagccggctgagaggtcaagcggcgagaagcgggtgcgggcgggcggaagggctggacgtagcaggcgtgcgggcgacttctcgaccacaccgtccttgtctcctctcccaacctcagaccggcaaggagccgatcgcagagaagacagacgacgcacatgctgcccaagtcccggcttgtcctcgaggatctcctgcgcctcgagctttgcgcgcgcctccggcgcaaggtcaaacttctggatgaggtcgaggtcgcgcgtccggacgcgagtccgggccgcacggtggacgtcgcgctgggctttgtggacactggaggagtaggcgggcgcgggtgtgagaggcgaggctgtcagttggtgttgctctgttgaaaaagctgtgactggagcaagctgggtctgtcgctcgagagccgtctctcgctcgctcgccgaccagggcacagagtgaagggagcccgctcgagccaaacccgagccgagccgagccgtagccggccccttgaagaggtcgcatgccagcaggacagaaggaggacggaccgggaacgacggagacggcccattgctgcagatgtggaaggtggtcgggtggtaaggggtagaggagaacgaggaggacgaggtcgcagagctggccggctgcgcagacctggtgggcggcgagcggaattccaaacaactgcagatgcgagttgaggctcgcagccccgacccctcggaccgtctcgcccaagatggtcactggtagggtaagcacagtagcaaggaggacgaggacattgattgagacaacgagagtgccatgtatgctgcccttcttggcgtgagagtgacttgcctgcctgcccacgctattgccgctcggcattcgtcagggcggccgactcccgacgactgccaacctcgcaacgcccaccaccccttgcatccgaccgaccacccccacccttccagcatacaagcagcatggcaccccctccgacctcgctctcggcctcggccccactcgcgctcgacggtccccagaagtcgtcaatcctcgcaacctacctcgagaagaacgagcagtgggcgtgagtctcgcgcgcgccctctctctctccccaacgaccccctctcgtttgcgctccgcctctacttgcccgctcgggcagacgggcgtatgcgtccctcttggagggcatggccgcgctcagctagcccaggccgtggccagataggacgagacaggatggccaggccgtcgtcgtgtcgccgccctctcctcccaccgcttgcgggacaacccgcgccgccttccgccgagtcgcgctgacgtgctctcgcttcatccttctggcaggaacgacgttcaagcggccgaccggaccttcttcaagcagtcggctctcggccagtcgcctaaggtcctctggatcggctgctccgattcacggtccgtccctctcttgctgcgacctccctgcttatcggtgcctcggcgcgcgaagggttgacgcgagctagagctaggctcgtgtcgcagcgagcgacttggcagagactgacgtccccaacctcttctccgcctcctagcgtgcccgagacgacgctcctcgccgcccggccaggcgacatcttcgtccacgtccgtccctcccccctcctcctctcctcctgccgcgcgcgagggcccaaagcgctgacgtgctccccccttccccctctcgctcacagcgcaacatcgccaaccagtaccaggacgacgacgactcggcccacgccgctctccagtactctgtcgacgcttgcggcgtccaggacagtgcgcccccccccccccacatttttcgcagggagggcatgcctgccggtggtcgaggttcccggcttgcgatgcttaaatctaggccggacggggcaggctggtggctccgggtcggttgcgcggggaaccgacttccgcggttcgacccgtcgctgcccttctccaagagagatgccggttaggccaagcggctctcttcctcctgaccagccgctctctgctgcagcaccctcctcctcatcaccctcactctcagtaccttcctccccctcatcccctgcccgatgcgcttccagatggcgatgaacgacgacctgacgcgctggctgacgccgcgtgcgccgttgcttccggccgaggttcgaaaccaccctcctcctcgacccccagcctgccctatcgcctcgagctgaccttggtcgactctcccttgaacctgtccaggatccaacagcctctgccggtcactcgcccaccgctggcctcggctcgtcaccgcaaagcaccgccgactcgcctccagtccgtcctctcgcccggcccgcagttgcccagctaatctgaccacgtcgcgcacgccctcctgcagtccgagttgcccagcactcccgggcagaagaaggtcgacctcggcgatggcgagctcctcatccggcccgggtcgaaaggagcgagcataccctcgcgaatgtgggtccactatgtcggcgacccggacgaggtgtgtcgtcaactcagcatatctctggcctcaaggctgactgtgtgcctgcgctcgcaatcagcgggaagaagagcagctcgacccgtttgcgatctgcgtccaggagatggaggttttcctcaaggcggccggctctgccttctccgacttgggcccgcacgcttcgctaacggacgactcgcagtcggcagccgaggaggaccacacgatgagcaccgacgatgacacagatgacgacgacaacagtcggccaacgtcaccgcctgcccggtactcgtcaccctttgcgccggacgcggtgatcgctggcaagcgcgcactcgaggccgacatgcgtctcccggatggaatgttgagcgcaatgccgactgccggcggcggtgaggacgaccagagccggccgaccgagcgcgtcgcgcagagtcctcgaccggcggaggacgtcggagccggtgcggaggagagccgattgaccgaggacgagggcgagggcggcgagagagagggtcaggggagccaggaggacggggcggtgctcatggtagaagccgagtgcctcccgggcgagccaggcaaggaggcccgtgatgaggtacgtttgtctctaccgtgtttgcgaagatgcgtgccggctgacttcactcgcctctcgtcgctcagcagaaggccaaagagccgtcgtcctcggcaagcccggacgacagcacaccaaaggcatcgacggccgccgtgggccgtcgccctccgcttcggcgtgcacactcgtcacccctcatggacagcccagttacggagccggtccgcttccgctctgcccctgccgttcctacgacgacgacgcaccagacggctccaagcaagggcccttccctgccaacgtcaccgcgtcgctcgcccgctgcagagtacgctgcgactcgccggtctagctcgcgtatgccgcccgacctagcccaccagcttcagcaccagcacgcgcacgaccggctgtcgcccatgcgctcgccggccagcagctgcgggagcccgggaggcgtcgtctcggccgaccagggccaggctgactggcgcgagccgcgcggcaggggctcgtacttcccggacgatgtcagctgagcggcctggtccggtcgtcggtcgctcgaatagtcgtagcgcaacgagcgccggtcggcttctccttcttctctcttctcgttcatcctgtcgtcctccctctcgtctgtctactccggcccttttcttgtacgccctcgcctagaagagacgaggagcaacccctagccctacctcctgcttgatccctccatgctgcaatggttgtatgaataccttctctctccctccacgccccaagactggcgatccctccagagatagcccgcgcatacagctgtccgtcagccaacaataccgagcagcgcaccgccgaggacaaggactccggccgcgtaggcgtggttcataccgccatcgccgacaatggttgcgcaggctaggccgtcggccgcggcgcaggctgagccggcgacgacgagccagccgagcaggggcttgttggccggcgcgaggctgaggctgaggaagatggcagtgcctaccagtcgtgggaggtggcaggaagagccttagcgacgcatccgtcgccagcggagaaatgaggacgtgtcgcacctatgaagacgttccgcacgccgagcgcgacgctgagcgcctggacaagcttcttgtcggcctccttctcgggcggcgcgcacgcaaagaagctgatagcctggagcggccggaagatctcgtttattccgaagcctacagagaggattccgtagccggctgcgaggagagggagggcgggcgaggtcgagaggggcatggttcggatagaggaggtcgactgcgctgcgcgcccgtcgacgggaacgagggtggatgacgagggtgatgcagtgagtctatacttctggtcgcaggcgacagcagcagcagtgcagcaagcaagtatttacagggagtatatgatgaatgatgggggttgagggtcgaggcgagatggacacgtcgggttttaagctctggcttgcctggccttcggacttgcttcggtcatcgcgggcgtgcagccgccggatccgaaggctcggccagcaaggccgaatccgcctgactcgagtcagtgtcgagggtgtcgccatgtgaggcccaggatgagggtccggtgttggtggctagcagggacagctgaagcaaaaggggacgcagcgagagagccgtctcaggtggtgggtcaaggagggctgtcaaaattatatggggttatatactataattgtgaggtcatttctatcaaatgcgttggccaaacggtcagcgtttcaggtcgtctatcaggaggttgcgggttcgagtcctgccctggtctaactggatacaaattccctcgtttcgagggccgggtggctcaatggcggagcgtctgactacgattcatttttgctctgctcgccgatcttggtcgaacttttggaagtcgctttcgaggtcagctcaggcagagcaggaggctagtctgctcgctcttagcgagacgaagggatcaagccggacgcttctcgtacagtagttgcttcagcccttcgagagccgggcgatgcaagcgtgcaggcggaaaggcagggtacggggagggatggccttttctttgacactagtccctccgtatgcgcctcgcaaccggtcgcagctgtcgtcgcccgtctcccgaggcgctatgcgacatggtggattgaacatcgagacagacgcctgacgcccatggcgtgctcacgaccgctcgagcagccggagtgcaagcgcctcctcgtcctcgaactcctccttctcgtcggagacggcagttgcctttgatggcgctgcctggcgctgcttcttcgccgccggcggcttctcgccctcgacgtccgagtcgtcgtctgagtctgcgtcctcccagccgtcctcggaggatgacataaggcccgacaggtcgaggcctggcatcggctcgccttcggactcggagcccgagtcgtccgacatctcgccctcgcgtccggtgccctcgagctgttaagcgaagaagaagatcgggtcagcaacgtcgacttggagccaagccgcaagggctcagtcaacgtacctcacgctcgcggtccttgcgcttgcgcttcttctcgcgcttcttctcctttgcgacctcgcggtcgccgacgtcgacgacctccatctcgcgccgctgttcttcgacgaaacgggccttctcgtcgcccgtcttgcgcgcgcgctcctcgtcctcgccgacaaactcgtagatctcgtgcgggacgccctcggcgtcaaagacgagcttgtggccggcgccctttgccttgagcatagccttcttggacgtgcccatcttgagcttgcgcttcgagagctcggccgaggtgatgtcttcgccaggggcgagcgcctcgtcttccgagtccgactcgagcccgtggtcggtccgcttcagcgtaaggaagtcgtcggcgtcgttgccacgggcggccggcacgtcgtcgagcagacctgctgccggagcagacgacgccggctcggccacgagattcgcatagtgctccgacaagatgttctgattctgcttggcaaacatcttgtcgtactttgtccggacggccggcgtcttggccggctgctgcagcaaggagagaagaacagcacgtcaataagagaaggagagctaggacggcggcggatcagggtgacgcaccttagtctcctcctcgtcggcgctctcgacctcggccttgtcctcaaggatgaccttaacgcgattcttcttcttcttagccatctcctggtcgataaacttaacttgcggcgcaccgggcagaccgagcgactctgcaaagagctcgactggcagctcggcgaccgagaagatgcccttgttcttctgaatgtagaccgatttgaggtacgaaatgaaggcccgctggccgagatacttgagctcggggtcctggaaggcaaagctctggagctggttgctgatcgactgcgtcttggacgcccggatcttgattggcttgacgccttggacgcccttattctcgagctcggcgagcacgccagcctcctcggacgggaggacgagtaggagcgactggcccttggactcgtagcgggccgtccggccgacgcggtggatgtacgtctcgccgtcttcaggcacgtccagctggacgacccagtcgaccgcaggaaagtcgagtccgcgggcggcgacgtcggtcgcaaagaggcagcaggtcgacgtcgtcgtgaacttctggaagacggtcaaccgcttcgactgcttctgcttgccgtgcagctcgagaaggggcgtgcccgggtggagcttgcagaacgtctcgtagacgaagcggacctaagccgggtcggccacctgatcagcacacgtccaagccagactgagacggccaccgtgaggcacgcacctgcttgcaggacgacatgaatacgatgatcttgctcttgagatgcgtcttgatgaaggagaagaggacgtcgagcttgcggtggagctcgacgaccgcgtagtgctgctcgagcccctttggcgtcacccagagcgcgcgctcgtcgccctcctcaccctcggcaccatcctcagccccctcagcaccgtcctttacctttgtagccgaggccgagagcgagatcgggtccttgagtgacagccgggcgaggtccttgatcgacttggtctgcgtcgccgagaagaggagcgtctgccgtgacttgggcagatgggccatgatggcgttgagcgtccgcttaaagcccaggtcgaggattcggtcggcctcgtcaagcactatggccgtcgtacgagtagtcagggaggttaacgctgaagggcgacagcgtcgtgggcggatgcggagcaggacataccgagcagctgcaagttgtcgcactcaaagccgaccgtctggtccatgtgctggaggagccggcccggcgtcgcgacgagaatgttcattttggtcagacgctccatctcgtccttgacgttcttcccgccgatgacgaggccggccgagaacgaatggtacgggccaatcttgcggaggacctcaaagatctggatcgcgagctcgcgcgtcggcgagatgacgagcgcgccgaggccgtcttgtggtccccagcgcttgcggtagagcgactcgaggagcgggatcaggaaggcgagcgtcttgcccgacccggtgcgggccgaagcgaggatgtcggaccccttgagcgagagtgggatcgagagcgactgaatgggcgtcggcgactggaagaaggccttcttaagacctgtcacagaaaccggtcacaggaaacggatgagaggacaagaacggtcaggacatagctcgagggcatgggccggcccgaccggtacaagcgttggaatcgacggccggggtggagaagtgaggctggacgtacctcgcttcgtcttgtctgacaccgggagctcctcaaacgtcgcgagctcggccggcgggacctgcaaacaagaaagtcgtcggtcagcacttcctacatccgttccacgaccgacctgctgagctgcccagagtcggatgcagggacgcacgtagctcgcgagcgcctgctcaagctcgacgagctcgtcggcgttgcgcgtcttcttgacgccgcgagcgccagacgactttgagctctttgcgcgatcaatcttgcgcgccttcttgacggtcgacgggccagcttccgacatggttctgtgcaggcaactggacggggtacaggaggaacgggacggagggtgtcaaggagagagggcgagcgacgcgcagtgaggaagggcgaaatctggcccctgtgcctcattcggggctcgctacccagaagcggggctacttaatgcccaatctggggtctcgaccgccctcgtaccggcctcgagctcgacgacgagctcgcctccggaccactatcactctgccttcgcttcgctttcagggagacgccgccacgatggtcgagacgccgccgatactgcgcctgatacccaagctcttcagcgcccggacctttgtcccgtacgtccagctcgcagccggcgggaaggcgcctgctttgaacgcgtcacagcctgaccctgacctgaccgctccctctgtgcgcgctcgccagcgacgttaaggtccctgacttccggcagattgactttcatgcgctccggcgagcaggctatcgcggtgtcgtcgtcgacaaggacaactgcttggtccgtcctcgtgcctctcgctccgagtcggagccgaccgaccagcccagcgactgactgcgggtccggcgctcctgctccttcggcagacccgaccgtacaacgatacgctcgtaccgcatctccggccagcctgggaagagtgcaaagctgcttttggacccggccgcgtgctcatcgtctccaactcgagcggcactcggtccgacccgacaggcctcggcgtgagttcgctgcctctctcgaccaggtcgtccttgcgacagctggcagcgtgctgatcctcttggacggtttgctctcgcaggccgaggcactccatcgcgagacgggcgtgcccgtcctaattcacgcccgcaagaagccgctctgcgcgcgcgatatcgacgcctacttcggcgcgctcccgccggctcatcctctccctcccttgaagcccgcagcagaggcagcagcggccgctgcgccgaacagccacggagtgcttagtgcggtacggaacgtccttggggttgatcagggcggaaagcgcagcgctggcgagtcgagggcggcaacaggaagggagctcggcctcgtcgtcattggcgatcggctcatgaccgacgtcgtcctcacgggtctactcgccggaccacgagaaggtccgccggtcgtcgttgccgctggcctcactccaacacctgcggccccgtcctccgcggctccagcaccagcattgccgccgccaagctcagccgcctctctgacgcccgtcgctgcggtcaacacgccagcgatcggtatcgtccagcgccaggcgccctacaatctctcactcctgacgacgacgctccatcaaaaagccgacgtccggcccctccgcttgatcgagcgcatgctcgagtcgctcgcccgcaggcggctcggtcggccactcgcgaccgacattgcagcttggcggtcgctaggcgtcatccggcctgaaccggagccgctcgcgcctgcgccgctgcagggctggcgaaaggggctctcgctcgccggccgcggactcggctggtcagtcggcgaacttgcaaaggggctcaagatcagcgcgctctggctcggcgcgaaggcccggcaggcgtgggctgaccgacaggcgaggcaggcggtcgaagccgagcgagcggccgaggagcgcgaggtcaagcagaaggccgaagtcgctctcgaccggctcgtcaaggaggatgttgagcgggcgcacgagttccgcgtcgctgctgatagcgaggccgacgagcggcgagcagagccccggacggcaccggtgatgccgcagaaggaggttgagatcgcggccgtcaaggcgtgatggacatgcgtcccccgagcaagccgcccagcgagtgatcgtctccaagaaaaggggtctcatcgtcatcggtcccgtacgtcgggcgaagtataagcgcgggcctgcctactcgccccgctggagcttgtcgagcgcccgcgagccctcctcctcccaggcctcgcgcgaaatccagaactcatcgcggtgtttcatgatgtcggccaggacggcgccgccgaggaaaaccatgtgcttgcgtcggggcgggtcctcgatccggatcttgaagttctggtggggcgagacaagttgtgtcagcatcagcaggggtcgggggtcaggcagagggacaagcggaaacggaccttgagccgctccgggttgccgttgaggaccttgctcagatagagctgcttcatctccttctcgagtcgcgatggcaggccggggtacatgctcgagccgcccgaaagtaccacgtgcttgtagaggtcggcccggacgtcgaccgccgcggcttggaccgtgttgaagagcatctcggccatacccggctgctcgacgtcgacgaggtgcggctggaacatgcactcgggcgcctcgaaccgctccgagccgaccttgatgacccgaccgtccggaagcgtgtagttctcaacaaggaccgtcgtgtcctccgagagccgcttgtcctgctcgaggtcatatcttagtcgtagagcagggtcagtcagagcgccatcgctcccgcgtgcgcagaaagacgcacgacgtgtagcagagcttctccttgatcgcccgaaccgtctcaaagtcggccgttcggttgaaggcgtagccgcgcatcaggagcagcttgatgaggtaccgcgtcacatcccggccggcgacgtcgagtcggcgcgtcaggtgcgggagcgcatagccctcgtagacggggacaatgtgcgtcacgccgtcacccgagtcgacgacgacgccagtctggaggcctgagaagggcagcggcagacggggtagacacgtcagtcctcggcttgtgcgcgcgcaaggaagggcaggaccgaccctgggcatagagcgtgaggacggcctgaatcgcgacgtagacgccgccggcccggtagcgctcaaacatgacctcagccatcttctcgcggttcttctttgggttcatcggcggctccgtcaggagcaccttgcggtcggccgggtcgacgccgagtttcgtaaacgtgtagtcccagaggtgcgtcatgtcggtccagtttcggacgatgccatgctccatcggctgcgtcacgttgaggaacgaccggtgctcggcggctgcggccagtgcagggcagggcgtcgtacgcgagagcgagcgaagcagacgagagcgagcgagaggcagatgaagcggtttgagagcgtcagctggttgccaagctatgagtgtcgcacacgccctcatcaagccggcaggagcgaaagcctggtgttcctggagaatgcgacagcccgctgcgccggggtcgcgtcacctcgcccgcctcgctcggctcgagccaggtgaaccgtcgctagacgcccgcgagccttccaggcacgcgccaagtgtagcagccagccccaagcaaccttcctgaccgggggattgaccgccagctgtctccggcagaggatctgacgataacaacgctagaaaggaaactgaagccgacgcaccctcatctccgaccatgatgtccttgatctcggcgctcccgaggcgctcttcggcgcgaaggatcggccggccgacgattgaaggaaagactacaaggcgcagagcaaacagtggaggttagccagtgagggagttcagggagcagagctcggcgagctggccggctggctgagctcgagcagatgagcgcgagcggaccgaccatgctcgggaaagttggacccggcaaagccgcacttgacgaactgtcgagagcgcagagagcgtcagcagacgaatgagcaggacagaggttggcgagagggaccgacaccagtgccgttgtcgacgacgatcgggagggtcgggtccatctgcggcgagaggcgaggcgaggcgagggctgaggaagggcggcggcgcgctggcgagtctggacgagagagggtggcttcaacaagtctggaggggtcagaacgagcttcccggtctgattagctgtgctccttttggctcacctgctgctgctgtttgtatagagggttgagggtacgggcgcgatggaggacgacggtgctccctgcgcatctccctcggcagggcggtcgatgcactggcaagaggcacgatgcgcatcgcgcaggttcctctccccccagttccgagtgcctcgtcgaccatctgctttgctgagagcgacgacggcactcagagcgtcgacacccgctgacaatctcgatactgccgcggccgaactacggcgacgagttggacgaagggcgcaatgttgacctcgcgtcgcacgacgctcgcacttaaatcgacgagacacacctttcacacccgcgctgacgctcgtcgctaagagtaacgtctactgctcggttaaaacatgattcgccagcgcggaacaggaaaagggcgacgagaatataaagcatgcgcgaccaaggtgccaaggtggtccttcagcggaggcagcgcatcagccgacacttttgttcagcccggccagcttcgtccagatgcggtcggggtcgcttggctagaaggaggcgagaaagccgagtcagacgtcgaatcgcaaccaaagcaggagataaaggctcaaacgtaccgaatatgccgtttcctcgggaaagtccctctgtcgccgcgtggccgtgcgactcgtataccgcgccaacaaacgcctctaagacgtctgcctgctggctcgggttgaaacggatgatggcggcctgggtgccgtgcgcctggagctcgaggtgaaggccgtataggacggcgagccgggcgtggacaacgtttgactcgagcgcacccttgatgctcagctagggtacgagtcggtcagcataatctcgatctgaataggagagtacggcagggaagcgtaccgtgatagcgccgggctgcagcgagctgtccatcatgacggtcaggcagagcttgatgaccgtgtccccgacgagctgggcacgaggagggggcacgagaatagagagcgtcagcgattgcgaagcgcttcgagtctcgagagaaggacgcacgctgcgccgctcgttgtcggcgagctcggccgggctgcgctgaaaggtcgtccgagcctggctgaagagcgacttgtggattttccacgctcgagcggcctgaccggttggtaccagtagagccggcagctcctcgcgtgtgaggaggcgagcaggatcttgaattccgggtgctggacgatctggtcggaagaggggaggagcggcatccagggatggaggtatggtcggctaagggctgctgctggcggagggaagccggcagctggctgtcagcacaaggcgacgtcgcggccctgtagatcaggcccccaccttagatcaagaaatctcgttcgtcgaaggcgtccgggaagaggaccggagcgagaaagtcgacgtttagagggaggcgaggactcgacagactcgagggtaaaggtgaaggtaaaagagaacgcggctgctgcgcgcgacgtcaaggcccctttgatcgtcgcgtccgcacaacatggacggcaaccgacgacggcagccttcgctcacgaagcagcgcccgagtcgggaacagggaggggtggccagacgatggctgcacattggtacagtacaagcggcgaaggagagcgggtgcgaccgtccgcgattgggaccgcgacacagcaaaagacgaagaagtgggtgcgaagagggaggtgttacaatcgctggcaggataagcgagcttggagtctactgagagagagggagtaaaggtctacgaggtgacgggggtcggtactgcggcggcggggccggcagccttcgaagatgtggctggcgactgagaaggaccggccgtcgcgacggcgacgacggccggcgacgggttcatcaggctgccgaggagcgacttgccgttgcgggcgcgaggcagggcggtcggcgtgccggtcgcagcgtcaaccggcgaggtcaaggccgacttggtcgaggacggcggggcgaaggacgacttgtcggcagcggcagcggcggcggcggccgaggccgctgtgggcttgcgctttcgcgacgtcgacgatgagggcgtggcagtcgacggcgtcggcatcgctgccagcgcgcttgaagcgagcgggctcggcggcgctgtctcgtcaccgtcgcgggcgctcagcggctggtcggccccgccgctcgccttcttctgcttgccctcaaggttcgccatcaggcgggacgccttgcctgcgcgccggcccttgcgccggcggccgtcgccacgcgccgcagcaatcgcccggaagttgatcgccttcttgttgcggtagtagtaaagcacgcattggtcggctgtcttgtgcgggagggcgccagcaatcttgcctgcggggggcgtgaaagcaggtcagcgcgaggtgtagggccagacggttgccggacgacgcaccaaactgcttgggatggctggcaaacttcttggcaaagatctcgcgctcctcgtcggtccagacgtcggtcgaggtcgtgatttcgtaaaaggcgtccgggtcgaggacgagtccgttcgcgtcgtcgtacgcatcgcgctcgcggatcatcgggtcgcggaccatgtcgggcacgacggcggccgtccgggccgcgcggaggttcgggtcgaggtagtcggcgtcgccgagcgaggcgaggatcgattgaaactcggcctcggaccggacgacgtcttggaagtagccctgctcgggatagttgccccgcgtcgagcgagaggtccggccgggccggaagtcgtcaaagccgccgaggccggtcccctgcaagggcgtcgcgctggcgccgccgggtgtgtagacgctcggcgtccgtgcgtgcgggttggccgccggtcgtttggccgccttgcgcttctcggtcacccgatcgagccgagcgcacgaagccgtccactcggcgttgagcgttcggtactcgcttcgcagctcggtcagatgctcggtttcggacgcgagggcaagctcgacccgctgcgcgacggccgcgcggaggcccgcttggcgctcgagcgagaggccctcgacgaccttgagcggcttggccgacgaagtggctgccgccgcctccttgacctttgccgaccgagggagccttgagctgaccggatcggccaggcaggcgttgaagccaatgatctggccgatctcgccgtccgagaggaggacgccagctgcggcacgggcgtgcgagatgacgtgggccttgacgaggtcgagcatctcgtcctgggtgagcgacgagcgcgagacggacgacatgtcggcgtcggcgtcgtcatcggcgtcgtcgcccggagcagcggcagtcggcgtcggcaccgtctcggcagcgtgctcgtcgatctccatcgcctcggacgacgccatgagcggaacggcagcgtgctcagctttaacctcgacgaccgtcatgtcgacgtccatcggctcgggctcgatagcggcggtagcgacgacggcctcggcgaccttcgacgttggagggctaatcatcggctcgggcctcgggttgaggagcgtttgaagcgtgcgggaaggcgagcgcgaagccgaccgccggacgtcgttctcgctcggcgtcaagccagagacgaggaggctcgcggtcgtcggaggcggttgctcgctcggactggccgcgacggcggatgcagactctggcttgacgggcgagtcgggcgcggtgacggcaagcggcaagacgtcagtccgcaagacgacgagtgcctcggctgttcgacgagggcggaggtcagctcttgcctctgcgaccgacattgacgctcgagctaggattgcgcgttgagagaagagacatacctgtcgagccgagcacgacctgcaccttctcgtcggcctgctgctcgcccccaccggtcgcagggacgctctctggactgacgggcccgacgacgtgggccgtctcttcgccggccgtctcgggcggcgtcctcggcgagtggtggtcgggcgacggaggaggctcgacagcggcagccgtggttacggcggctggtggcggcggcggcggcggcgaagcggtctggcgtgctggaaggttcgtcaagggagcaggcgcagggggcgacgctgatctcggcggcgagaacggcgtcgagtgggcgagcgcggcttgaccgtcgacacgacctgccgaggttaggagccgtggcggcgacgacaagcgctcgaggagcgacttcgtctgcgacgccggcggccgagccggagggggcgactcgtcctcctcgccctcctccttctcgtccgcaacggcatcgcggttgacgacgccctgctcctctgctgcggccgagggctgcacaggcagcccaggcgcaaagcgaggcgaaggcggtcgtaccggcccttgaggcctgccgaacgagctgcctccggcgaaggacgtccggccggcggccgaggaggggtgcgggtgcgcgacgacgaccggcggcgggaggggccggcgcctgccgtccgggccggtcaggacgtctgcccagccgccgacggctggggtcgacgctgacgctggtgatgcgggcgggagcggtggaagaccctcgcggtcgagcgtctcctgcttgactggaagggtcgagctctcgtcgaggccgttgacgctcgcgatgctgctgctccgcctgtgctgctgctgctgctgctgctggccgcctggccggtcccattggctcgccccgggctggcgcttgcccatcgacggcggcggcgaggccgttcgcttgcctagcccgccgcctctgcccgtcgtcgtcgaggacgaagcgttgctcggcctccgtcgaccagcagcagcgtccggcggcgccggcgtccgctcgggcgagcgcgactcgcggtagtcgagcgagatcgactcgccccggccggcattgtggtctggccctccgccgccggcgccggtcccgttgctggcgtgcgcgtacgggctgaaggtcgatgttggctgggcggggtaggtcgaccggccgccgttggtgctggcggcggcggcggcggaggggccgaagcgcggaaggaggtgcggcagcggagggtacgaaacgcggccgttcactgctggcgacgtgacgccgctggccgtcgttgttgtcgggtaaggcgaggagaagcgcgtggtcaaccgcggagcgccgagcggctgcgggccagctggcggcggcggggccggcgttgacaccaaaggccggtcgtacggctctcgtctgcatgaagggagcggcgggggcgagtcggacacgcgccgacgaggcagggcgccagtcgacgcgaggtggggcggcaacggccggtcgggcggaccactgctgctgccgttcaactggcctggggcgaaccgctcgggccacatcgaccgtctcggaggcagtggcggggagagcgagtgcggatgcggccggccgttcatgagcggcggcgcgggtggcaatggaaagccaccgccgttccgcctaccgtcgtacggagaccgcgctccatcgaccgacaacgaaggcggcccgtcccgctcgcgaaggtcgcgctcgaggcggtccttttcgcgcgcatccgactcgcgccggcggtcccaatcgtccgcggccgccatcgggtgctgcggcctcctcggcccgccgccgagcagcggcgccgaagaagacgagggcgcactccagtcgcgctcccacgagccgcgactgccgccgccgtcctcgcgataagggtagtcgtggaaggatgccgccggcgggggcgagggcggcccgcgcggcccaaagtcgtccctctcgtccggctcgtagccgtgcccgccataaggccttttgcgaggcggcgagaagttgggtctcagagggaggaacgacggcgggaggctgctgccgccgccgccgttggcgcttccgtatgcggttggcggggccgggctcgacgacgacgacgccgagggtatgcgtgtcggaggtgggtagggcccgcctgagccgttaacggtcggcggcggaactgagcgaaacgatccagcaccatagcctccagcagaagggcgcgcagaggtggatggcgacggcgagcggtacggccgttggggcgagggcgaccgccggcgaccgaacgccgacgagggcggcatcatcggtccgccgcgcgcgggaggaggcccatccggggttgagttgctgtaggatggaggtgcactgtgccgaggctgggtttggatatagggagtgcgagcgaaaaagaggaggggtgagacgggaggggtcggaatggggcggtcagagatgaggctgaaagcagaagggaccactggacggcgacctcgcggatggcagagctgtaaccaagcaccccgagtctgctcgaaggccaagagaggaagcggacgtacctctgatccagaccggtcggccaggtaggcggacaaggatgatcccggaccctcgccagaggctgctcgtgcgccgctctgacctgaccctgcggccgctgctgccgcgcccgccttagccgccgccgtccaccgattgggcgcggtcgagacggtcgcgttagcggatgacgaggctggacctggacggtcccagcgcgggagcggcggtggaggcggtgctgacgaaaaagggaggatgcgggcttgcgaggaggaggaagaggcggccgaggtcgaagcgatcgaatagtcgtctggcgtcgccgctgctgagcgagggccccaggacggccgcggatgccgagcggcggcggcaggaggagaaggcgagcgggaccgcatgcgcgaagaagctgccgatggatggttgggtcgggcaagagcaggaggaggagcaggtcagcaaaggcgagagtgagagtgagagcaagggcgagagcaggaggcgcgcacctggcgtgcggcccaagagcgagagcctgcttcgagaaggatgctcaggctaattgagagaggagtggcagggatggggttgtggccatgcggcctggctagtcttgtcttgtgggtcgttgtctgctggtcgagggcaggcaagaagggcagccggcgggcgagtctcacgcgcgcgcgctcctgttgcggcggcggccgcagagacttttcccgcgcggagaggaggccagcgcgctcgacaccgaccaccactcttgctcctccttccgcaccaacctcttctacatacactctcagcaaacatggccagcatggacatcgacatgacgcttgacgacgtccgtccgctctgcttttgaagctcatgcatcgagtcgcaacggcgctgactccctctctctccctggctccacccgcgcgacccgacccatctcttcctcctgcttcttccgctcgcactcggcccatccatccaccccatccatccagatgatcacaactaacaagaagaagtcgcagccccgcgccaagcgtgcgcccaagccctcggccgcgcctgccgctggcggtgcccgcgcgcgctacagcggcggcgccggcgtgcccgctgcgaacggccggcaggcacaggcggcggcgaacatccaggccggcggcgccggccaggcaaagattgcgggcgaggcgttcaagatcatcgtcagcaacttgccgctcgacgtcgacgacgcggctgtcaaggtgcgtccctgcgtcgcccagagggcggtgagggaggatggcgacgcgcttcgccactccgacccgagcctgcctctccaccacccgcccgcggcctccaacagagtctaaattgtcccgccgccgccccctgacacccacgcaggacctttttgactcgacgatcggccggacgcgtgagtgcgcgctcacgtatgaccgcaacggcaagcacaagggcgtcgcgaccgtcgtcttccagcagaagggcgacgcccagaaggccttcaagacttgtctgtcccatcgtgccctccttttttcgcgactgagagaggacgtgagctgacgggtgttgttgctgctgctcgcgacatttacagacaacaaccggctcgttgacggacgtcagtacccacctccctcgcttccccccaacacccaacctaccctacgtcaaggtcttgtcgggagctctgctttcaaagctttggaagacgctcatcgtcggacggcgcagcgtcttcgaaccgtgaagacgtgtcgagcacgtctgggctgagatcggccggatcaggtcggcttggccggctctccccccagcagcgcgcggcggcttcctctcggacctgaagcaggcgagacagccttgcggcgcgacgtgacgcatccgccgcagcgtgagcagggtcagccgcagacgctgccctcggtcaacctccgaccgcgctctgcccgcctcccatgtggagtcgcgtccttggggccttcaacccgatcgaggctcttcggagatcctgtcggcttcctgttaggtcgtcgtcagcacgtcgccttggcatcgaagcgtgccctgcgacggcggccggagggccagctccaaggtcgaactcgcgcgcgcgtgcacttccgagcgccgcgcgagttcaggacgagctgctcggcttctcgatctggcgacatgcgcgctcgcctgcttgccgaacagctcacaggcgggccggcggcgacgactcgtcccctggcgacgtgcggccggcgagtctgcgcttgggcgctcggggccggtcggacggctggccagtcggctcggcgtgactgagcttcagccaggctgcgcgtcgcagaggctgagcgccgtcgctctgcgcaagcggatcgacaaggcccggaggaaggcgatttcgctcgccggagaagcatggtgcgggccgccagcccgtcctccagcctcagccgtcaagctgcaggtcgctcgacggagtgggtggctcgggcccgtctcacgatgccgtcccggctttgccccagggctctgtcgcagagaacgcttgccggtcgcggcttccgaccgctccctggacggaggcgcgccttttcgtccatgctgccgtcgcatcccgccgcgctgcagtcctcctcctcctcccacatccgcttgcccgcgctcttgctcccacctgtttgctttgcgccaggcaccttgcccggacatgccgactgatccaagccctcgctcactcgctcgccctttccgccctcatcccttttaaaatcgacatctcaacgctcgacatttgaacccgctccatcgccgatgcttctcatcgtgaccgcacgtgactccttccctccaggcacgccgatgaaggtcgagctcgtcttctcgaagccgcccgcgccggtccagacgctcgcctcgcgcgtcgctgcccccatcgctgcccctgccgctccgttcgttacctcccctgccccttcctcccaaagacctctgcggctgaccgtccctcgcgctttctgctcgctttcgttcgacgccagccgtggtgccgcccggcccaagaagggcgccaacaagtctgccggcaccgccggcgccgccaagccggccgactcgggccggcggccgcagaagtcgcaggccgacctcgacgccgagatggacgtgcgtcctctttcgtgttccacgcgttgcagctgccgcttgcaaaaggcttgttgagctcgagctgatccgactgctgaattctcgcgccacagacctggaagacggccgagagctcgaccgccgccgctccggccgccaccgagaccgccctttgaaccggcggcctcagtgtcctcttccgctcagacctttcgctccatcgcctgtggccttcaaggctttatttctacccaaccgtgtctagacgtcgacggctacctcctttacccggggtcgccgtcgctcactcgctcgtctccattccggcctcctcgtccaacccttctcgtcgtcctttgacgagacgtttactatccgctctatccgaatgacgcctctcttgctcttgtaacccttgcgctgctctgaaggatgcgaccgtcgcgaccgaccgtgcgcccgtcgtcgctgctgctgctgcgcggcctgtgggccgccgtgcctcgccttctgccggccgacggtcttgttacttctcctgacgttcatcacccgccctgcctcgcccttcgaccgctcagcaacaagcgaaagtacagaggaagctagcacaccgtccgtcctgcctgatcatcgtcgtcgttgccagttagcttgcagccgaccgggcgatgctcgcgtcccttggccgcttccgctctcacgaatggccggctctctccactcctgttgcactcgccgcgccgctgtctcgcaccgggttcaccaccgcctggcgcaccactttgtacgcctctctcttcgccgcgcatgacatgctctgccggcgcacactctttccgttgcgagtggccaggtcgtgggaggtcatgaatggcgtgacgtagagtaggagagtcggaaggaggcaggggtgagagggatacatgattgcgaggggcgagggttcggtaggagggcgtacaagacaaggggtcagagagagatgaatggagggggctgcgcagcgatcgatcggtcattcgtcctctggttcctcctcctcgacgatgccgctgctccggatgccggtcgcaggcagctgccgacgggcagcggcggtagacgacagcggagcggctgacggcgccgctaacgcggtgtcggccgggctctgggatgcgccgtcgatcggaacatttgacccgagccggggcgaggactgctggcggctcgctccgacggtcggccggccgtagtaagccgacggcggcggcggtggcgcggccatgctcgtgcgaccacgatagccacccggcatggcagaagcagagggcgggccagcagcagcagcactgttgctgctcgagggaccagaggacgtgccgccgctcgactggccgcgggcgttcgtctggccgaggccgccctcgtagcagtcatcctcgtcgacccagtcaccctcgtcgtcgccgggcttggccgcaaagacgtcacggaggacgatgttggccttgggcgtcaggtcactccggtcccagtggctccggtgctggatgcgcgagtggtatggcgagtgcggaataccacccgagagggccgacttcggccggtgggcgacgagaacggtcggtccgtacgtgccgagcgagctcgtcgagcggccggcgtcgtccgaggactggtactccatctcgtacgaccgagggccggcccgccagtcgccgcccgaattggaccgattcatcgtcgacggccggtccgcggccgatgacgacgacggcgaggaagagcgcgagttgggcgacgaccgaatcgaggccatcgaggccgaccgcatgtgggctgcctgctgcgacggtggattaacaatcttgtactggcgcatcacctttgtcgatgagcccgagccgacccgccgatggtagttttgcagcggcgacgccgccgtgacacgggcgccgtggatcgagccggccgagctcgcggtcggcgaccgggacgccttgcgctccatcgcctgggcgtgtaggctaagcgagtggactgaggacggccgcgagcgcggccggagctcgccaccaacagccgcttgaggcgttcggtcggcggcgcgagtggggtcgctcggccggcggtgaagggccgaaacaaaggggccgtcaagcgcaggtcggggagggctgagaacctcggagccgctcgcgaactggccagagttgagggacgatcgccgcgagtgatggctcgaggcttgcgagctcgaccggtgctgcatcgccggccggctactctggagcgacgtccgacggctgccattggccgagtagtagggcccctgcttcggtcgccgttcgagcgactgccgggcagctgcgcgactggcaacgcctgccgacgaggcagagcccgcgaccgagaccgagcgctgcgccatctgcggaacgacgccccgcggcttgggcccagaccgcttcttgttgtcagcgccgagccaagtgcggaaggtcgaaaagagaccggtcttgccgagcgagccccgggccaatgacggcgactgaacgacgtccgagtagtctgacgaagcgtcctccgacttgaccgagctgcccatctggctgccgctgtggtggctggggccaggaacctcggtccgagacgagttggttgacgacggccggcggtcgtcgaaatgcgacgacggtttgcgaccgaggttgagaagctcggcccgaggcgtcggcggcgacttgctcgccttggtcggcatgattggcactgcgggcgatagcgagccgcggcgctcgacctcgtcgctgaagccgcggtcgtccgactttttgcgtgtcaggccggcggccagcgtctgaagcatgctgaccgacgacgacctcgtcttgccgagttcggtccggcgcgacttgccgggcgaggcgttgggtgaggtcgttgagagcggctcctcaacaagtggtgtcggcggttgcgagccagagtcggacgaaaggctcgggtacgagcgcgaggccgagatggcgccgaggcccaagagcgagttggcctgcagagcctgcatcgactgcgacgacgagatcggcggtgtcggcggctcgacgttgatcgggcccggcgcaatcgaggtcgagccgaacgggttgtcaaccgcttgtgcgagcccggccgtcggctcgcctttcggtggcggcggcaggggcgagtcgagccgctctcgcagcgacagcgcctggctttcggtcgacgacgcatcgctgtgttgccgctcgacacgcggcggtggccgctgttccggctcgagctcgcgcggtatcgtccccggcgagacccctgccgagcctccggacacgaactgcctctgcggcggcagcggccgggcggtccgctcgcgctgcctgctgcctgtcctgtcgcccatctcgctcccggtccgcgagccgcgccgaacgagcgactcgcggcgctgggtcgcacccttgccccagaggatccaccagaaggcgccgctcgtgtcgcacgcgtttgttcggacgctgtgctggagctggccgatgtcgacgccgataagcttaagagcgcggagcatctcgtcctcctcctcggtcgagaactcgggctgctggatgtcggccatgagggtgagataatcgacgttgacatacggcacagcgcccttgtgcggtagctgcgaaagttgctgcgtcgaggtcgacggcgttagccgttccgagaacgaagacgagaccgaccggcgcttggtccgcgagggtgtcttcgagtgctgggtgaacggaagcaggtgcttgagcagcttgtcccgctcctcgtgcgcatggtcgaccggatgagcgtcgtgctcctcgtcctcctcgcggatctcttcgatcagatcggccgagccgcccaggggcaggagctcgcgcgaggatgaacccttgctcggcgtcaccgacgattcggagcccgacttgcggatcgtcgcctcgctcccggcccgacgcagcgtcggcttcgggctgcctgaccgaggcgcagtgtcttgcccgtggtcgccgccctccttggctggctcttcgtcgggcgcgtggccgctgctgctgctgacagtcgtcgggctcgtccggccactgcggacctggtccgagtcgccgtccttccactcgaagctcgtgttggtctcggtctcgctgcctggcgcagtcggctgcacagcggtcggctcgtccggctcctcggcgaccggcgtcgggagcgggcgcgaactcgagaacgacagcgtctcctcttcaatcatcggtgaggtcgggagctgccggacggccgtcgttggcgaaggcgcgttcgatggcggcagcgaaggtggcggcgaggggtagatgcactttgtaaaccacgggtgggcaaggatctgctggacgtttggccgttttgacgggtcgaggtcaagcagggtgcgaatcaaagagcgcggctctggaagaggcagacaaggagtgaattagccttgaggactacggccacagcagcggcgccacgaactcacccggctcgagccattcgggatcctcgtactcgccgcggatgatgagcgccttcatcttgtcctcgtcatcgtcgtcaaacggcaggccgccggtcaagaggcagtagaggatgatgccgagcgaccagacgtcgacctctgaatagagggtacgtagaggtctcgtaagcggttgtccaaggtggcactagactcgaccggaagcacgtaccttcgccggtgtacttcttgccctggagcatctctgggctcgcgtagccggtcgtgccgcaaaaggtctcgagcagccggccttgctcccactcgcgcacaaagccgaggtcaccgagcttgacgcggcactcgccgtcgagcaggacgttttcgagcttgaggtcgcggtggacgacgccctttccgtgcatgtagccgacggcgaggcagagctcgccaaagatccgccggccctcgacctcggtcagccggcccttttcgacgaggtagtcaaacagctcgccgccggcgcagagctcagtgacgagccagatgtgcgactcggtcgcgaggacctcgagcagctggcagatgtgcgggtgatgcagccgccggtggtgatggatctcgcgcgtcagcgaggtcatcgatgacaggtgctttgggatccgcttgatcgcgcatcgcgtcgacgtcaggcggtgcgtgcagatgctgcgagaaagagggaagggtcgggcggaggcacatggtcgaggggtcggtcagctccttttgtccccgcggttcggccgaccaccggagcctgcttctgcgagcgcaaaggcgggagaacagcgaggacgcactggacggttccgtacgtgcctgagcagatggggatgacaagtaggccagtctcagcttcagtctgcagggacgctctccggccgagctcgcgccgccgcgtggtgcgccttcgatgcgccatcgaccggcggcggcggaagacgactgctgaaggtacgggccagggaaacgcaccctcgccaatgaccttgccgagcgtgtagcctccaacgacgcggagcttctcggtcccgagctccttgccgagctcctggtaggcggtggcgagctgtgcgaggaaggagggtcagcgagttgatcgtgcctctctccgcacgcgcgcccgagctcaaggagggagccagaggaaggggagccgcacccaggccttctgattgttctggctcgaggagcccgtctgcgaggcctggcgttgatggctccacatgcggaatgtgttttgtatgctaaatgggaggaagaaaggagcgaggtaaggcgggtcgaggaggcctccccgggcgggcagggggtcggtgttggcgggcacagccgtcgctcctccgtcgctctggacgacgaccttcgccgcacctccgaccaggatgatcttctgccccatctgcgccaacctgctcgtcatctcgatcgcgacgggcgaccagatgtgggcctgccaggcctgcacctatcgcttccccatcaccaagcaggtcggtctcccggccgagccccaaatctgctgcgggttgctttcctccgggcctcgtggactgacatcctctactctcctttcgccaggtgacacagcggacgaggctgacgaggaaggccgtcgacgacgtcctcggcggcgaggaggcctgggagaacgtcgactcgacagaaagtgcaggcttactcctaccggtccgggcgcctggctcgcagacgcgtcgtccctcagagctgacgggccgtcccactttgaccccagtgcgctgtccaaagtgcgacaacatgaaggcctactggatgcagctccagattcggagtgccgacgagccaatgacgaccttctagtgcgtttagcaggcggccgtgcagctgcgactctcgtgctgaccgctctgactgcctcgttcgtgacagccgctgctcgtcgtgccatcaccagtggcgcgagaactagtcgtcagcgacgcctggatcaattcctccacgtatcggcaatccgacaagtggacgtccgccattcgacgctggccggcgtgtcggctcgtagggcgacacacgaacccgccgacgacggcctgcgcctgagacctatcttaacgaccttgacgatcattcctttcgccatccaagacgacagggagacgagacagagagcgcatcaattgacaggacggcgtgcccgactcaagcatccggcgcaaagagcccgacctgggccgcgctgagccggaggaggaggtcgccaatcgtctcgtgcgagcgcatgacgactcgcgcgacctggtgcgggaccgtctggccgaggatgccgacgccgaggctggtcgcgtcctgtgcgtttgagtgcttcacaatccgcttcgggtggagcgcgaacgagagcgtgaacgtctcatcgtcggccgtgtcgcttgcgaggccgtacgtgtcgctcgcctcgctcagcgtgacgtagacgacccgcttagcggcctgagccgtattgctgaaaccggtggcgacgcggaaggtcgtacttggcgaggaggagagaaattcaaagagcgtggtgtacttccgggcggacaagtagaaggtcggcgacttcgccgaaaagacgagctcgaccggaagtggcgcatggtgtaggagccgcttcggccttgcgccggatgaggttcggagcaggatggtcggctgcgagcacgagaaggtcgagttgaaggagctctgcgtctggaccgaggtcgtcgtgtcgcttcgcatcactggcagcggctgcgctggcagcgggggtactgctggaggtggggtctggaaggctgccgcctttgagatctggaggacagtgggaaagctgagagttaaggttcgcattgtgaagcgttgtactcttggttggactcacgtcggcgagcgagacggcccggctgaggcggcagacggcggcctggacaatctcgccgctctcctctgtcgtcgccggtgaaaagagcatgagctcgccgacgtccatcgctgcatcgtcggcgcttccgtcatggtcgctccagccgtcgcgctcccactcttcgagcgtcttgactgcgccgtgagcctgtgcgagcacctgcttgagctcgggcgggaccggactgacggcgaggacgtgcatctgggccgacgcagccgaccgaaggctcttcatgctcgtcttaggcgcgattgaccggtcggccgtgtgcgggctcaggatggccgagagaatggtgtagcgcgccgcctgctggcggagactctggttgctcggccggagtcggagccgtttcgagttcttgcggatgaggacgggcgagccgggcagaaagtggctctcgcgtgcattgggcgagagggcgttgatccgtcgtgggccagggcgaggttgaggctgggcgccttgagtcggaccgaccatcgacagcaagagggtctggaagctgcccgagggcggccggaggtcaggcaacttgggcggctcgagcgggatcttgttgacagcgatgggctcctcgccgtaagcctcggtggcgtcccaggacgactcactgctgaccagatcgaggtcggcctcgctcgaatcatgaccgctcgacgacgcggccgtctgagcgacgccgagaatctgctgagctttcgtcggcatgagaccgagcagcctctgagccttggtcggaaccggctggccgccgccgccttcgacatagaagccgttgcgggctggatgacccggtgaaacgcccgatggcgaatgtgagtcgagcgcaggcgtcaggagcgctgagttcatttgcgatgcggtcgagggcgagcgggcggacgagagcgagccggcagagctgccgccaccgtgggcgataaagcccggccgaggcggctcggcgtcgagctgggcaagcgaggttgagtctggaggaggtggaaggccgaggatcttggtcgccttgcgcgggatgccgcgcgagtcggcagagacgttcgagacgagcgaggttgcgctgcccgagtaggcgtgccgctgggcgaatgacggcgagggcaggatgccgcagccgccgacgacgctcgggcggtgcagagcctggaatgggtcctccgggtagtgccggacacctgacgaggttggcgaaggatgccggccaacaaccggagatgagccgtgcgtcctggcaggcacgaaccggccgtggagcggagagcgcgggacgttgactctgcgctgagccctctgactctgcgacagcggtggaggccgcgtccgggcgcaggccatcggaggcgtcggcaagccgagcgtgtgatgctgcgtgaacggcgcggccgagcgaaacgatgctggcgagctggccatataagcctgcggcgttgcgagggtcggtccttcccgctgctgatggccgacgtccgaccgggcattggcaggcgcgacctttgagagccgtgccgggccaagaggtaattgcggctgcgacgatgggctcagccacgactcgatctcgaccgtgttgaccgaggctcgcgggccgatgaccgtatcgcggatcgggtcgcgctggaggccagcttgggccggatacggcggaggaggagcggcgtgcgacgcctctacagtgagcgtctcagaggtgtaccacgaccgagcgtgggctggcgcttcgagccatgcacgtggtcgggcttgctgtggagctggctggctctgcagggcagcgacgccgagagacgtcgaccttggcggttcggctcgccagcctgaagtcgcaggcgacgacgacgagtcaggaggaccgccgccagggagtgagtgcgagtggtagtgaagctgttggtcctgccagcggactgcgcgggcgacgagagcaagagatcaggtcagctgcctgctcatctgcttgagctctggttgtgcagactcacctatcgggtggtaaggcgtcggaccgatgtcgaagacggcgccagcggtgcctgcccgcggtcgctgcggcttgccggccatgacttaggagaagagaaagggaagaggtcgggcttgaaggtcgtccgacttggcgctgatgatggccgcctgggcttggaactgcttgagacggaggtcgggctgcctgcaaaagacagctcgatcgagaagagatagatctgcgtagacggtcgtcgagggtacaagaagagagcttgagtggcacaagaaggccaacgctcacctcttcagatcggcccacctgtcgaggcagctccatcatccgagtgcgggacaggaggctagactgcgggtcagcgagaggggtggctcccatcaggagggcaggcggaagtggcgtcgccagccgtcccctgactggtgacagtttgacaggaggtggctggcggtcaaagggaaggagtcgttgggcgacggcggccggcaaagacaggagcgagcgggctgaacgaaagggcgaaaggggcccgcgcagccggcctccgatgtttatgctgacgttgctctgcttgcacgacgtgaagtcaatgacagagatgtacatgcagagaggtcgagggcggatcatctcggcagaagggtggcatggtgggctacagtgagaatagatgcaagggcgcttagagcagcttgacggcgttgccgacgagcgtcttggccgtctcgagctcatggcccttgagcgtgcgcaggacgcccggcgaggcggtcgacccggtcagggccgacgagacaatgtcgaccgtctttgcgatcgtccccttggtctcgaggaagaatcggatctctttagggatgacctcaatgagctcgatccgggggtcggtcgccgagccgtcgtggactccgtcgccctggtcgtcgaaccacgacttgagcatgggcgagtagagcttctcaatcttggcccggtcgttcgagacgttggcgacgccggcgatcgagatccacgacgacgagctcgagtcgtagtagctgagattgacgtgctaacgaaggacggagagcaggcggtcagcgacgatcccttgggtccttgaaacaacctccggctcaccttgtccttctcgatgccctcaaactttccagagttgacgttgccgaagaagacaaactcgagcgagtcggtcgaggccgggtacatggcgcgcgagtggagctcgtccgagtcgggtgcccgggtcgtcatcatggcgacctgcaacagcagcagacgagagtccaaggatcgagtgtcagtcgaagggagcagatgcggtcggagagagatcggggcgcaccttgatcgtcttgacgatctttgcaagctcgtcgcacttctgcttgacattgacgtcgtccttggtgttcttctcggtgtaagggtcctgcttggcgtcggtgccgacagccgaccgacgaatgggcgtcagggacaagcaacggcgatgcgacggggcgacgctcggcagcgaagacgaggagggccttagccggccaagagccgataccgccgccgccgtcggccggaggagctggagggcgaccggccgacgaagcacgagcgagggtgagggacgcaccgacatggctgcgagtgtgggtctaggatcggggtttgaaggagaggagaagaagtgaggcgttgatggtgatgggaaggagggcagggatgaggaaggcggctcgaagtcgaagccgcgctggcgcatcggggcgggcgaaagacgatgcgcagcaagcccacggctgatgacgtcggtctctgaacgacagccgcccgaccatgctgccggtcttcgcttcaccatcgtgctgctcgagtgcggcagggtataggcgatggtcacaagctctggtcgggtctcactagagctgtctgcgaacatgctttcggctgcctgtcaagtcgaggccgatacgcgtttgctccctgtggacccctcaccggccaaaaaaaagacgcagacgagaagcatgtgtagggggtgtgtcctagcgatacagtgatagaagcaaggagggagtagaaggtaggagggcaatctctgcggacgagcaggtcgggcgggggaggagcgtcagctcaaccgtttacatcgacgacaggcgcagagcagtcgacacgacgcacaagtgcctcggaggacggggcgctaaggactcgaagggattctagttggccgagggcttgtcagacgaggtcgacatcttgtcaaacgagcccatcatgctctgaaggagaagaaggaaggcgacgtcagcttgaagcgcttgcagcccaggttgctatgacatgaggccgcacctggaggtgcttgcgcatctcgcgcttgtagtcctttgcaggcttctcgtgctcgggcgtgccggccgcctgggcctgcgctgggtcccaagtcgacgagtcgtggccgttggtcgacgaggtgtcctgggccggcgcagtagaggctgccgactcggcctgctgctggtcgctgctgctgccgccgtcgacgggcgtgatgctgcccgatgtctgagggctcggctcggcgagcggcatcggcggtgccggcccgaggttggctgcaatcttgccgccattctcgtcggtcgggctcgaccgccggcgctcctcgagcttggcctgtcgggccttctgccggctcgactcaatcttctcggacgcctgctcgcgccgctcggcgtcggaccgctgatgctcgggctggtgctcctcgcggaccttgaagcccttgcccgtcgtccgccggacgagcttcgacccgatccggtcctcgtccgacgaggccgtgccgtcggtcgccgacgaccggcgccgcgaagacgagctgtcctcttcggaggcggcccgggctacctcgtcctttggctcggtcgcatcttcgccgccgagaatctcacgcgcgccctcgaccgccggggtcgtcatcgccaggccgccagggaccgggaatgccggcggcggtgcgccgggcgtctccagcgccggcgtcggcagcggcgtcggccggtagcgcttgccgaggttgaagttggacgtcgtgtgctcgccgccggcggccgagctgcctccggccgagtggtcagagtaggtgtcggagagggcgggcgaggcgagcggcggcgaggccggtcgggccggcgaagacgccgacgacgtcggcgggttgatggcggttgagggcttgaggggcgtcatgcgagaaggaaaagtggaggaaggggcagggggttttaagcaagccaagtagcgccggcgggagggtctgaacgtgacaggctgggtaggggtgggtgttggtgggtaggttgcgagaggagagggagttgtcggctgatctggcgttgtgggctgagggctgaacgacgacagagggagtgacgggctttgcacaacaggagctaggccggccaacgacttgctgacggccgcacagacttcaacggtcatccagcctgccggcgagccgggcgggcgatccccctcctcgctcctccttccttcgagggctctcgccccgcctttccctgtcggtcgtcgaaggacggacgcacgtcatggcagcgtggggcaagcctcgagagccaaagccgcggcggcgaggttgtcacctaattcgaagcccgcagcagcggagcggcatcagcagggcaggaggagccagagagcagaggagccagcagtatcgttctcgctatttgtcgctcgaagcaggcaagacgaaggtcgaagacaggtagacgacaggtcaatcgtcgttgtcgacggtcgtcgtctccacgctctggcggatcccacggcccggctgacttttctttttcctgggtggcgcgcgcagcaccggccgaagccgcccggacgacgatcctcctgcacgcctgtccgactcgctctgccaacagctgactttcttgctctctgagcatgctcgagcaggattgatagcctcgcaagtcacagttcagtctgatagctcaacgtcagaggcaggggccaatgcagggcttgctgcggctcctgccttgccgccgcctattcccagcctcgtgccgagcgccgctggccatcgacaggccgctctcacaacgctcacctcttctcgcattcgcccatcatcatgtcgaacgccgcaaccagcccatggccgaccgcgctctcgctcacgcccatcgacttatcggcgctcatcccaccctcagccgccggcgagcgagactcgggcaagcagccgacgctctcgacccacctgctcgacctcgcgctcgaccagctctcgacgtttcccgacccggccgcaggttggaagcggctagccgaccggcctggagcaaacggaggagagggtgcaaaggtcgagtcgtaccgttcggccgacggctgggccggccggcgaagcgagcatcggccggacgagctcagctgggagcacgtcgtagtgcgtcgaaccgttgctccactgtcaacatcgctcgagctgactctgcctgctgctctcttgcgccaggatcacgtttaccaccggcactacgagaccgagtccgaatttgtgccgacgctcaaagccttctccgctctcgcgccctcgccgctccctctcggcccgctcccttcccgactcgcgccgaccacctcctcctcctcctcgtccgttgagcgccaagctggcctcttcaagctccactacgcgatgccgacccctctccaaccgcggacatttgtcgtcggcctcctccagacgctcgatcaatcgcgccgtgagctctggacggtcacggtcccggtcgaccatcctgacgtcccgcgctcgagcggaaaagagtcgggccgcgttagggcggcgtatgcctcgatcgagcgcattcggcagattgaaggcgaccggctcgaatggtcgtacgtccttcgcccgcggtgacttctgtcggctacggctcctcgctgacttgacggccccttctcgccgctcctcgccaggatgatcaccctctcagacccggccggcgtcgtcccctttgcgatcgccaagcgcgccgtcccggtcgagattgcaaaggacgtcgccggcctgatcgacctgctcgccgagaagcgccgggctgcgactgcgtctggtcgagcatgagacgacggcagaggctgttcgccctctcggctgggcagaggccgctctcatccgatgctcccgaggccttttgcagacggtcgaagacggcgaggtgcgccaccgggttgcatcgccattgtgtgaccgaccgcttgcaccgactcgtccttcggtgtccctacgcgccctcaaggtcctcgccgccctcctcagttactggcttctgccgaacgccccgatcgacaccaagtaagtgagcgagaagcagcgctcagatgactcggacgaggtcctcggcctgcgtgcgttggtcaagaaggtggtcaaggaccccaagctcaacctctgtatgctcactcagcactcccattatgctttcgcaaccgtctgaagacgtctttccgtcggtgctttgcgggcgtcctgcccttaccgagcatgagcgtctctggtcgtcaagactcatcaacagaggcaacggaggggaaggcagagagagggctaacagagggctcagggagggtcaagggaggaacgagcttcaggagaactcggccctgagctcggcgtcgccgtagctaaagacaaacgaccggaggtcaagtagagccgagcgctggaccgagggtcctttgttgacgagcttgcgcgcgccctcggcgctgacgtcgacccccaacaatctcctgatgcttcgcagctcctagccggcagctttgagcgcgcttcgcttcccagagtcgtcggccttccgctcggtcgctggcaaccaaatcggcaagatgtcagccgctgccacgggcttgagcgaggctcgcagagcgggaggcgtacgcgactttgcgagccacgtccggcacttctcgccccatcgtcggtctcctccctgcgatattccaaattgaacctcgcctgcgacgttgcaagagacgtcagctctagagctcgggtggaggcacagacggcgagtatggcggcgacctcacagatcaccctgtagatgaagcagcgtgtctcccagtcgaggccgaggtcgctgcagagcagatgaaggatgcccgtcagttgttgctctctgggagagggagagcgcgtcaggacgcacagcaccaccttgcggtgtcccttcagatgatgcggcgattgagagggtcagcgtcgagatcgctcagcaaggctgtcggtcgcaggtacgagacgcaccggtatgtcgtctgcagatgaagtgaataggaagggaaggaaggtcagaggagcagactggaagtttaccgcagaggacgcacgagttgaagagtaggcgagcaggccgagtacttcttttcgatccgagcgtcggcctccaccagcccgctccggagttcggcaagaaaagcgggtccagatccttgccgagctgacgtcgaacgactgagcgagggcaccgcaagaagcgtcaggaatgacgccacttctgcaagtaggacaagagggcaagacgcacagatatactcgttgcgcattcacgccatatatcaggcccactcgtagtccttcgccatagcgatcgagtgcgccggcacggaccacagaggacgccactcgggtctggaaggcgactagggtcagtgagagatgtgttaaagcagcaagtcgcgacagcgagacgtacagcatggtcgacggatcgcagtcgacgtttaggcgcccgaaatgtgcggcaccacgagccggtacttgcggttcggtagcttggtcaggttcctacaagcgaacgacgaaagcaagcaaggctgacagcgagaccggtagcgggagcctgcgggaggcttcagccgcactccataaacaaccagacggtggaggccagtccatcgggcagccgcctggcagccggccagggaaggtggtgcctggaagcgtgcgtttgccgtcaaaagcctgctgcctagtacgccagtagcctcaatgctggaagcactgttccgccggccggctgtgtcgagctagagcgtcgtcccgccgaggcccttgatcgtccgccaagcgccgatgtcgagcagcgagtcggtctctctcggagcagtcgttcgttgcgtgtccatctagctcgggaagagttgccaagcggctcgaacaacaaggaggctgaggagaggagacgagatcgacggtcggaaggagggggcagcgggacgggaagcgacgacgacgacgatgggagcggcgcacgtagtcgacgccgcgaggaagtcggcgcgccgcatgctatgaacgaccgctggctcgcgcacttgctctctcgccctccttatccgcagtcagacgctgtgtaaggagatgtatctgcggagctcgaggccagatgattgttgcgctggcagaagactgggaagagggccggtatcggccgcatcggatctgcctctgccgttttgaggcgagccgcagttggaggcgccgacggcgtgctagctgatgaggctggacgtcgctcgcgctgacggcgagaggcgagggccgtcggtgcgccatagcgccgccggcaaagcgagtgatgcttgcccagcagggcaaagggacaacgccgagcttgttgcgcttagtcgatgaattagcctaggtggcgaggatagatccggggcgcaaaaccgcgttgctgcgagcgcgttgtccgtgggccgctattgcctgcgaatgagatcgtcgcgtcgctcgagctcagatcgggagaaagttgccgacaatgcccataggtacgccccagccgtcgcgggtgacggtaaagctgaagcagcagttgatctgccggccgccgccgccctggcccggtttcgaggacgaggacgagcgcttcttgaggagccgagccggcggtgtgagcgtgcacgtcgttagaacggccttgcgcgatttgtcaaagccaactgatgggcgacgaaagggaggttatgcggtcagagagagaccgtgaatgaacagcaattgagaggtacgcacttgagcaatattgctagagggctcgcaaggatgcaagctcgaggtcagctcgattgcctcagtctccgcgaggacaagacccacctcccaaaagttgatggctgcctcttcggtcatcagctcaaagacgatcagacggccctcgcggaaccagctcatctccatgcctagcaaggcggcgaacctgagagcgaacagcagacgtcagactcaaagcatcagcagcctgtgaaatcatgcaggcaggctcactcggcgttggccttgaagatctcgcccgtccgacgccagagacagcttggcgtcttgacgactgtgaggggcggtcagcaggcaaagagtcaggaagtgcgactagtggttgaggcacaggcggacgcaccggtaaagacccggtcatactggagcatcaatcgctggaagccctcctcaacgagcatgatgtcctcttggctcatgccggcgatgatctcgcgcaccgttggccggaagatgcggagcggcgcatagacgcgctcccggttcttctccgagcagctgcgaggcggccggggcggaatggtcagcctagacgagctggcagacgacggagagtacaaagcggaaataaaagaactcacgtcgccagccagtcgtcgacagccttccagccgcgctcccagtcccagagcttgcccttgggcgcgagctgtgcgccctcaaactgggcctgcagcagctccatgaactcgcgcttgctcgggacgacgccagcggtgagggcgagacttgcggccgccggcgagctcggcatctgcggcccgggaagctgaaggaaggatgacgaagcctgcgtgaaggcctgcgtgcgcggcgagccgggacgcgaggcagcgagctgcgtctgcttgagccggagctgctcgataaaggccgcgtacgcttcgcggtcgccgccagagtcgtcaacaccgcccgcagccggcgagcggacgtcgggcgtgaagagatcaggtggaaagtcgagcgagtcgatgaaggacgagagcgaggcccattcggccgaaggcgcgtggtcccggccgaacgtctcgagcccgaacgatggaggcagagctggccacgagggcgagtggatcggcgtcggcgcactgggtgttgccgcgagcgagaggagatggtgcggctggataggggcaggccgtggcgggctgctcggccgcggctgggcaaacgttggctgctgaaccgccgccgtctcgaaggcttgtccggccggtgctggttcggcgctggccttcgacggatgactactggaagccgacgtcaagtgctgtgccacaggtagtgtgggtggttcgaccggcagcggcccgacctcacccgacggtgcggcatcagaagccgcagcagcagcggtcgggcggtccgactcgctctcgtcctccccgccttcttcgctgccgctacctccagcgaggctgctgccctcggggtctctttgcctgccgcccgaggaagacgtggccgcgttaccgcccgagccgttgagcggctgcgagtcggactcagtcgtgcagaggtgcgagatgccgcggcgaacgcagcgctcgcacgggcggcctacaatggaatggacggcaggtcagcagccggatatgcttcaagcgagagcaccggcgacgcacctgccgagcagaccatatgcgaccgacggcagaagaggcactatgagaatgtcagggcaaggcaggccgaggtgagcgatccgacgcgtcgtcggcggaggaggtacgttcaggcagagcaggacgaaccgccgagggcaccttcttgcgcttgccatccttgtccttctccggctcagtgtcgtccttgcgcttggccatagcagaggagatgcctaagtgattgacccgagtcacagagatcgctcggaggttatgttggtgttggcggcgaagagcgacaggcaggaccggacgcccaaattgagtctcgcaccgagcgttcaaccacgacctcctccgcctcctcctgaactcgctacgtccaattcagcggacccgcaaggcctgctcagattcctccactctccaggtgcgtcggaacccttcgtcttgcgaagcgacggccgccgaggctcacggcttcgctgcctgcctgcgcttcgccgcgccgcctgcgctcgccggccgacctgacttcgtctccttcgacgccgcggtcagcactaagcccaagctcggcctcgcctttcccccggcatgctctacgtcattggtctcggtctctcggacgagcgggatatcaccctgaagggcctcgaggtgcgtgtagaacccggctcgctcgggagctgcggctgctgaactgacggcggtcgccgacctctcctcctcacaactcttgcaggccgtcaagggcgccgctcgggtctacctcgaggcctacacctcaatcctgatggtcgacaagccgaagctggtccgttctttgtcctcaggcctcatggacgcccaaagttggctggctgctgatcctcacggactctctttcgcctaacccgcctggcaggaggagttctacggccgtgaggtcatcctcgcaacgcgggagatggtcgagatggagtcggacgcgattttggccgacgcacagaacatcgacgtctgcttcctcgtcgtcggcgacccgttcgggtccgtcgttctcctctcgaccgtatctctggggctggccgcagcagcagcagcagcagcagcgcgctcgagctgacctttctccctctttgcctgcagcgcgacgacgcacacggacctcctcctccgggcgcggacactcaagattcctgcccaggtcatccacaacgcctcgattctcaacgcctgcggcgcctcgggcctccagctctacaactttggccagacggtctcgctcgtcttcttcaccgagacgtggcggccgagctcgttctacgatcgcatcaaggagaactgggagatgggcctgcacacgctcgtcctcgtcgacatcaaggttcgtgagcagagcgaggccaacatggcccggtacgtccccgtcatgctgagcacgtcgagcgagggcgtcgagactgacaacgagcgctcatcgcttaatctcgcaggggcaagctcatttacgagccaccgcgcttcatgaacccggctcaggcgattgagcagatgatctcgaccgaggaggaccgcgcagagggtgtgtcgtctgccgtactcacgcaaatcaaccccagccctgagaccccgcctcgcttttttgcaggtgtcctcaacccaaaggaaacgcttttgatcacgctctcgcggctcggcacgccgacgcagctgatccggtcggggaccctcgagcagcttgccgccctcggcgaagacgactttggcggccctctccactccctcgtcatcgtcggcaagcgcgtgcaccctctcgaggtcgagtacgccggaggctatgcagtcgacttcgaggagaagggtaagcagggagaattctggcgcgtcgccaaggacgtgctgaaggttgagctcgagggcgacgagtagataaatggctttgcgcgaacgagactgacgggagcccagagccgcttagtcacgagagcgagagcgctggatctgattatcggcgacggctagtgcagcgtcgcgagaacgagctccgccccaggttcggaggctgaagagcgctccagctcgcttcgagagaacatctgaaggccagcgccatggatcgagcgccagcgcaagccaaaaggagcgagaatggggagggtagagaggagtcacagcttgagtgatgtcaagcgcgcgagttctggtcagctgctaccccgcaagcaagaaaagggagaacgtaccgaggcgagaccgtttgccggatagaaaaaggaaattagctgctggaggggagtagggggtggcgcagctgaagggctgtccggcgtgtcagcttgagtctccgtagtctttgccgccgtcgtcttggtgtcgcggttgccgtgctggcgtgcgtcggtcttgcgcgccttcacgatgataaacaagaccgcgtcggccttagtacggacaaagacacccgtggagagaagttggtcagagagcggacggttggtcttccagagaaagagagagaggcgatgctgaggaagacaatggcgaaagcagtgaggtcggcccgacggccgaactcgaagcagtggcggacgagctcaaggaggacgactattgtctccgcaaagagagtgagcttgccgttataagcaatgcccaactgtgggaagttaaagcgcttgacacaacccagttgaaggtggcgttgagagcgatatgaaaccccgcgatacgagggttgaagccgtcggactaaaagacaaggctttggtcagtaccgggactcgagcacaaacgagccaaacaaggaatgagcatcgtcggacgagagagaggttaaaagggaatgagtgggagagcgagggacaggagcgagatgggcgttgaaaggcagcaggcgacgacgactatccgcctctgttaagaagcttcaaggctgcgaaactcgatcggatggcgcgacccccttgattgcgacacaaaaggggcaaaccagctccctcgcggcgacaggcacgttccccctcgcatgtcgctgtccttcgcgtttcgccccacgatcgcctaagagacggctgaatttacgatacgaagcagcgaaccaccagcgagatcgaaaggagcgagttgagcaaacctcttcacttctaaagccttttgatcaaaaagcgtcaatggcagaggcagcgcagggcgagagatgtgcatgaagatgaagagtgcaggaagccgaacatcgcgagtcgtacaaagtcgtattgctgagggaaagtggacgccgaaggcggtacaagggggagatagagcaggaagacggcaagtgacgtccttcacgaggttgcccggttgatctcggcgaggatcttggcctggttgaggagtgcacgctgaagcagagaaaggggattccatgtcagccgtctggatagcagagtagcgggggcaaagcagtgcaacaggcacgcaccggcgcgtcgtcgcgcggcatgacgagctcaatcagccggcagacgtcgggcgtcgcaaaggcgtcgtcgtcgaggagcgcgtcgagctcggcccgcgtctcgacccggtagaaggcgtgcttcttcttctcgcccttcttgggccggccggcgaggaagtcgagcagaagcgagtggtcatagagctgaatgtcgttgtacttggcggtgacctgcaaagggaggggagggagtcagatcaaatgcggctgggcttgcgagaggccagacgaagacgcacgccgtggatttgacgctcgacctcgtagccatcgttgttaatgacgaagatgtagggcgtcaggccctgccggaggacggtgccgatctcctggagcgtcagctggagggcgccgtcgccgacaaagaggattgtccggccctcgtccttccgctcgcgggcagccatcgcggcgccaaacatggcgccgaccgaccagccgattgagccccacagcgtctgggcgagcgacatggccgtcttggggtaggggatgtcgaggacgcctacgaaagtcgggcgaagggagtcagcttcgagtggtcgacatgaaaagcagaagggcgagacggaccaaaagccgacgtgccggcctcagcgaggatgatgtcttcgttctggaagaacttgctgacgcgcggccagaggtactggtgcgtgatcgtgtccttgccccacttctcgtcctcggcggcctgctctgcctgctccgggaccgtctcggcctccatacgctggtcttcggcctggccgatgagcgcctgggtccgcttgctgcccgctttctgcggccggccctcgagctcctggaggaggagactggaaggaagtcgagagaaaagagagtcagtcgagggccgagctggaagacggcagaaggaacgacgcacgggagcagctcgcggtacgtctgagccgggaagttggcgtagccgatcttgacgtggttcgagtggagctcgacaaccttggactgatcgagcgagcccgaccaagagcccgtgttgacgtccgacttgagcggaccgatcgagaggacgaggtcggcgccctcgacaagctccttgacggccgggagcgagttggtgccgactgccgggcggagggaacggagcgcgtcagtcttagaatgaagcgggataccgacgaaagctccttgcaggcagaacgcactgtagcagccgccgtagtttgggtgcgtctcgtcaaggacggccttgcccatcggcgtctcaaagaactgcatgttggtcgtctcgacgagatcgcgcgcgagcttctccatgccaaagcgcgaggttccggcgtcgacgaggacaaccgggtcgaccgccgcatcgtagaggtcgagaatcgtcttgaggacgtgcttggtctgaggcgacggcgccgggttggcgacaggcgagggcgcgagcgagtgcggcagcggcaagggctcagcgaggctcgcgcccgagattttggcgtggatcaggtcggtcgggagcgtcaggtagacgggccggcactcgcgcgtcgcgaccttgatgagctcgtcgatcagctcgccggcgccttcggtccggacgagctgggccgtgtgggccgagatccaagccgacctggggtcggagggaaggaagcgcgcgcagcaggatgtcagccaccggacgagcggcacgagagggtgaaggaaaggcctgcgcacattgcctggaactcgttgaagcggccctcgccgagcgtgtctgtaaatgagaagagagtagacggacgacaggccgtcagccggggcgctcgagagaggcgggcgcagcatgagggcgggcgagccagcgcgcgcgcgagagatggacgaacggtggaggatggcctccttgccctgaagggtcgtcgacgggacgccgacaatgtggagcagcgggagacgctcggccatcctgtcagcgagaaagtacaggtgtcggtcaactggcctcggaagggttggcgcaaaggagatcgcgggcgagctgggcggacgacgtacatgccggcaacaccgcaaagagccgagagctcgccgacgccaaacgtcgtgacgaggcaggccatcgtcttgctgacgcgcgcgtagccgtcggccgagtaggcggcgttgagctcgttggcgttaccgacccagtcgagcttatccgagctctcgatgtagtcgaggaactcgagattgaagtcgccggggacgccaaagacccactttgtgtcgagctgaatgagccgggtgacgatgtactcgctgatggtgacgaggtcagacgcgccgttggcgccgttgtgaccgttgtggccgttgtggccgttggtgagggtcatcgtcgtcgtgtgcgagggaggaaggaagggcgtgatgatggcaggcaaggtaaggtgggtggggtcggagggagggaggaagagcgactgactccgtcttacgttgtctgccttcttgtagggccgcttggcctcacgcgggtcactctcgctcgcccgccatagtcgtgtctggtgatcttcgcatggatggctctgagcaaaccgcgtcttacgaacgaagcctgccaaggtcagccggggcggccgggcaagctgctgcgccgccgctgccgctcggcccgcgccgacaagaaaacacagcgtgcagcccagccagcaccgacgccgcggcctgcttcagcgcgagcgtgagaagctcggaacgacggcaacgcttgcggccggtcgcatgggtcgccggccgttggtttcgtaaggcgggcgagcggcacctgttggctcgtgcttgtgacctagctggcctcgccggctggcaggtcggccgctgcatgtgcagcgagccagcgacgaccgaactagagagctgacacgcccgacgcgtctaaggtcagagacaacgcatctatcagagaagaggtgggcatggcggtgtcgatacagtaggggggtgatgaggagatgaagagacgaatggagatgagaggtggagggcatggtgagtgcaggccggatgagagcctcgtcgaacggcagatggaggagggcagatggtcgagtgttgcaggcggccgctgacctacgcctcggcgttggcctcggccgtcagccgggcctgggtgagaagggcacgctgcaaaagaacgagatgacaaggagggcgcggtcagcctccttgattccgacagggacagaaagccggaagacgcaccggcgcatcaccccggggcatcataatctcgacgaggttgcacacatcggcggccgcaaaggcgtcgtcgttaagtagcgcgtcgagctcggctcgagtcgcgaccttgtggaacttgtgcttgcgcgggacgccttcctttggcgggccggcgaggaagtcgagcaggagcgagtggtcgtacggctggatgtcgttgtacttggcgttgacctggaaggacaaggggcgtcagaaagggctcgacacgcatgtcctctatgacggcgggcacgcacgccgtggatctgccgctcaatctcgtagccgtcgttgttgaggacaaagatgaagggcgtgaggcccttgcggaggacggtgccgatctcctggagcgtcagctgaagcgagccatcgccaactgacgacggcaacgggggaaggagagacaagggatcggtcagccatcagagagagaccaagaaaggaacgaggccggatgggaacacaccgaacaagatcgtgcggccctcgtcctcgcgctcacgggcagcgacggccgcgccaaacatcgcgccgaccgaccagccgatggcgccccagaggacctgggcgagcgagatggccgtctttgggtaggggatgtcgaggatacctgttgtgagcggcgccagcggggaacgtcagcgaaccggtctgtgcacaagtcgcaggtcgcggcagcctcaaaacgcaccaaaggccgacgtgcccgtctcggcaacgataacgtcctggtcgcggaaaaacttgctgacgcgcggccaaaggtacttttgggtgatggtgtccttgccccacttctcgtcttcggccgcctgctcgcccggctcgggaacgttaacggcctccttgcgctggtcctcggctgcctcgacctgctcgttggcgggcgtgctgccgcgcttctgcgggcgctccttgagctgctcgatcaagagcctgaagcaaaggtgagaaacagcactcaggcgtcagactcaatcacccttttgcggactggcaggagcattcgggggacggacggcagcagctcgcggaacgagagcgacgggaacgtcgcaaagccgaccttggtgtggtcgctgtggagctcgacaatgttgttggtctcgagcgagtacgagaaggagccgctgttgaagtcggactcgagcccgccaaccgagaggacgaggtcagacttctcgacgagctccttgacggccgggagcgagttggcgccgactgccgggcggagggaacggagcgcgtcagtctgaaactgaagcgggacaccgacgaaggctcctctcacgcactgtagcagccgccgtagtttgggtgcgtctcgtccatgacggccttgcccatcggcgtctcgaaaaagcgcatgttggtcgcctcgacgagctgccggacgtggcgctccatgccaaagcgtgcggtgcaggcgtcgacgaggacgatcgggtccttggccttgtcgtagaggtcgacaatcgtcttcaggacgtgcttcgtctgagccggtgccggctcgccaacgtcccccggcggcggcgcgagcgagtgcggcgccggcaggggctcgtagagcggcttccggctgattttggcatgcacgagatcggtcggcagcgtcaggtagacgggccggcactcgcggagcgcaacctttacgagctcgtcgatgagctcggccgcgccctcggtccggacgagcttggccgtgtgggccgcgacctgggccgacatcgtctcaaactcgttgaaacggccgtcgccgagcgtgtggtggagaagggccttcttgccctggagcttggtcgagggcacgccgacaatgtgcagcagcggcaggcgctccgacatcctggaaggtcgatcgcgcagcagcagcaacgacaggtacggaggtaaaggcagcagtagcgagatgtcagcgacgcgtccatagagcgggaaagccagcctccgctacaagagcgggcgacgcacatgccggcaacaccgcaaagagccgagagctcgccgacgccaaacgtcgtgacgaggcaggccatcgtcttgctgacgcgcgcgtagccgtcggccgagtaggcggcgttgagctcgttggcgttaccgacccagtcgagcttatccgagctctcgatgtagtcgaggaactcgagattgaagtcgccgggcactgtgggaggaggtaggtcgaggcagagtggcgagagagggtaggggaggagggtcagtgcaccgatcaacctcgacctggcgctgcacaagctcccagccggtagcgagcaccgtcagacgcccgagccgtttgcaagacgtacctccaaagacggacttgacgttgagctgggttaggctgaaagaggcgaagaggtaagagagcgggtggagaacggtcagctgtcgggttggctcgatcgaagcggcaatctgctgaagaggctgcggtcgaaaggtggaggaggtcaggggacgtgccgagcaagaatgtagtcgctgatcgtgatgaggtccgacatggcgagcgggagtagtggtgggctggtagtgatgttggttgcgaggtgctggccgtcttttcaaggcaggtcgtcgtcgggtgtcgtccgcctacgagaaggtcaaggaggatgacgcagcggggccgatggacgtcgaggttctcagggagctaagaccaagatagacgcgccgactcgctcagtctcgtcgcaaagactggccagagagctccgggacgatcctgcacatgctcgagaagccgtctgtatgctcgctgctatggtcgactactcttcaggctgaacgcagggcgaccgtgaaggaatgtcgacgatcgccgcgcagcagcaaccgctcgatccttccgacgcccgctttccttccgacaccttcgcccgaccttcgcctcgctcgcgtgcattctcattgattgccagagccctctagaggttgccctggtagacctcgagctcgcacgactcgccgccgacggcgacgagcttgccgtcccagtcgccgccgaggagcttctccttgccctcgttggcctttgtcggcgcctggcgctgaacgccgagcagcgcctgctttgggcttcggacgtcccaaaccttgatcgcgccgtcgtggcccgcggtgaagaacccgttgctgtttgtcgggtgcgcgcggacgacggggacctgcgaggcgtgcgcggccgggaacgagaggctgatgatcgaggtcgactcgcgggcgtcccagagcgagacggtccggtcggcatgcgacgtcaggaggagggtcgacgaggcagagagcggcgcgagctggtccatggacaagcaaaccttgtcggtcggcgcttgctgcaggggcatgagggcaagtgacagcggctcagtgggttgcgctacacgaaggcgagacgaggcacgcgcgcgaacgcaccttgacgaccgagttgacctggagctcgacgtcccaaccccggacgctgccgtcccagccgcacgaccagacccggccctggtcgctcttgtcccagacggccttaccgacccgggcttggtggccgcggaggactgcctcgggcgcgacccgccagccgccctttgagacgtcggcgtcctcgggctcgtccgcgagcgaggggtcgaccttgcggcgctttgtctgtcggtttgagagctgcctcgggacgggcacggctgggtcgtgcgagctcggcgcatggtggaccgggaagacggcgagcgtcgcgtcccagccggccgtcaggacgtactggccgtcggccgagggcacgagcgacgacacgggcgaagcgtggtggtggagctccatcagggccgtcgcttgcggcgccttgtcacccgggccgaggacgaacgaggcgtccagccgggggaccgaccagagccgggcgatgccgtccatcgcgccggctgcgagccagtcgacgtcgacgccggcggcgtcgggtcccggctggagccacgagcacgacgtcaggccgccggagccggcaccggccgagacggtcaggactggcgcggctgacgaggaggacgcgccagacgagccggccgaggtgaagatccggaggcgcgagtcgtaggccgacgtcaggaagagtctagcaagaggcacgaggccgacagagagcaaggtcagtggcggcggcgagcgacgggcggagaactgtgcgacaagcgccctccagtagcagacactcacccctggtgctgaaccgagacgtctgagatccagtcgtcgtgctcgtagctcgacaggtgctgaggcggaaggacgctctcgataaactcgagctcgagcacctcctcggtcttgccgccccggcgctcgttgacccagctctgaaggctcccctggagaagttcgccctcgacgacaaagtcaaacggaatcggcgccggcgccgttccctgagggtcgagaatcttgttgacgagcgcagagagctggaatcgccgccagttggcgggcaggatgaaggcatccgacgggatcaggtacttggccgagcgtgtcgtcaggcggaccgggagcgtcaggacggcagcggcggcggccgacgacgaggtcgatgctgtgggctcggtcgacatggctgggcaagagtaagagggtgcagaggtgcggttgacagctgtcgtcgcgaaggtcggtcgttgctgtcgaaggcgcagcgggcaccaccgtcgagtttctgctggccggccctttttatatttttgtccgctttcgccccgcccgcgcagtcacgggctgcctgcctcgtctcctcgcgtctcaccttgtcgaccaacaccttcgaccctcgttctgctcctcgtcttcgccagccgacactgctcgactcgaacagtgctcggacagttcgcatgagctcaagcaagacgccgcttgacgcggtcccgaccgaggacgacctcgtcgccatcagcaagctcccgatcgtcgacgagactggccagcaggtcccgttcggcagcctgttcgagcatcagcggacgattgtgatcttcatccggcatttccactgcggcctgtgtagtcagtatctgctttcgattgcagaggccctcccaccggcgacgctcgagcggtgcggcatgaagctcgtcgtcgtcggctgcggctcgtacgagcccatcgccgactaccgcaaggacatcgaatttccttacccggtctacggccacccttcgcgcgagatccaccggcggctcggcttcgtcagcacgctcgagatgtccaagggcacgaagccgtcgtacctacgcatgtcgcagtcggcccagatctggggctcgttcaagaaggccgtcagcaacctcggcaggacgttccaggtcggatcgtattcgcagaacggcggcgagctcgtccttggccctgggcccatgtgagtttcgcttggcaagactgcctagtcagtcagtgggtgggcaagggaagcgttgactgaccgcacctatctccgttcaccccagctgccaccacatccaccggatgaaaacgaccgacgaccatcaggaggttgccgacctacttcgggcggccggtatcgagccggacggcacgattgtcgccgcctgacgtcggtccgcttgaggtcggtcgaccgtacgccggcgtcggcgccgctcatcggcgaacaccttggattacctcgacgacgtcacaccggtcgagctttggtcgacgagccgtcttgtggcacacttctcacccagccccacaccgagcgacttccgtttgacctgacgttctgggcgatcgccagagcagcaccggctggcgcgcctgcaccgctctgataagcgaactgcctcgcctagaatgctctgctctgccatgcctgcctgccgtgtctacccttatctcctctggccctgagaaaaagttgagcgaggaggctcgctcgccttcggtgccggacgagtctcgtcggtcgcggctgcgcccaagctgcgccggccagtcgtcctgtcaaccgagcacgctgtccctcccggaccctcatctactacccagaggcctacggcctgctcgcactccttgccatcatcgtcttccggcctgctttcatcccgactggcgcgaccagccctcccgaaagcgcaacgccggcaacgcatggacgcgtcggctcggccgggtgcgccagacgcgctcgcagcaggtgagagagcggccctgcccgcctggggaaatccatcttgctcgagcaggaagctgaccttgacgtacgtggtggctgcttgctgctccagcttcaagcagcactcagtcgcgatacgcgacaggccgggagctcacctcgcctgccgctccctcgtccagcagcaggtcgctcaacgccgtcgccggaggttcgacatcctcttccgcaccgccgtctaaggcccagcttcggaaggagaaggagcggagaagcctcggcaacgagctcgctggccaccggaagaagcctcgcttggaagaggtgcgtctgggctgctgttgaggcctgttggtcggtttcgagctggacgcgaagctaagcgcagcttcctttgcggcagctccggaacaacagccctggggcgagcaagcagcgagtagagtacgacgaggacttctacgtgcgcatgccatcgctgtgggtctgaaggctcgaatctgggttgacaccttgccgtcacggttgcaattccttgcgttccccttcgaacctcggccgttcccgacctcgccaggacccgcaaggttcgcagccgcgcaactttacgacggtccgctacgacaaataccggatcgagacgggctacttctcgccctatccgatctcggcggctgaggacccggcactggcggcatcgcatgcgtccggcctgcgatcgttctccgggggcgacgcgccgtcagcggccaagctccagagcgacgcgccgaaagcctcacattcaacgactgcgaagcaacccagtcagctacccttgaagtcgtcccttagggcacacggccgcacgagcgacctctttgccggcggactcggcacggccgaggagggcgcgcgcggcgaactctttgtctgcgaggcgcgtcgaccggcctgggcgagccttcttgcggctgacactgctgacgctcccatcttcatctcgcagggctgcttcaagtacacgaagcaatatcgattgttcgatctgcatcgggttcgatgttccagccgccggaagacgaggcttgagaagcgtgactgaccccccctctacccctgcgtgcgcatagcggtcctgcgactttcgacatccgcccggcaggagagtcttcgaaagcgggtcacgcgccatctgggaggtcgacggcgcagaagccggcgtgggtcgcattcttctctcatcgtcgaccgagcaggtttgacgatcaaccgactgacacgctgtgctcactcgtgaccgcagctgtactgccagaacctcagcctgtttgggagttagtactcttcacccgtgcgctactctgaggcaatggaaagctgatccgagtgtccctccgtcagaattcttcatacagtgtgtccctagccgagcgctgccagagccacccctttgccactgacgcggtcctgctccctactgttagcaccaagaccgtcttcttcagcgtcggtgagttgatggcatccttccccgacgacagcatcttctgctaacctcgtcatacgtcgatcacagaggatttcacatactacgtcttgactgactcgtccggcagtcagagggatctcgttgtcggcttcttctcgaaggcgcgtcctctctactttcgtgtgtagccggcctcctgaccaagaactcgtccttacaggagaaggtcagctacgagggcttcaacctcaactgcatcatcacctttccgccttaccagcggcgcggccacggccggctgatgatcgagttctcgtacgtcctgacgcgcgggcgcggtccacctggaacgcccgagcggccgctgtcagatcagggcctcaggggctacctcagctactggagctgggcgctcgcaaaggcgctggcggaaatctttgaggaggtaccgagagcgggcaagcgcgggctcgagagcgaaggtgcgtctcgagtgagcatcggagcaagaagacaaactcgggctgactctcgcccacttttcgcaggtcgtccgacttcgtttgcggaaatcgctcgccgggcgcatatgcgacccgacgacgtcgcgctcacgctccaggacacgccgcttgtccgtcaggcgcgcgaccgcgagcgcgccgagactgagatcctcatcacgcgcgaggcgtttgacgaggtacgatggtccaagtcgattgttgcgagaacgcccgtgtactgatggcttctttccctcagttcatcgcaactcgtcggattaggccagagccgctgatacaagagtcgagcgtcttgctctgagcatgagctttgcaaatgcgttggcgagagaaagaccccttcgtggacagtgcgtgcagcagcgacaatgtccagctctgctgaagaaagggcttggtgagggccgcgcgcgaaagaccgttcgcgaagagcgccagaagcgtcagccgacccgaactcttccaagcccgcttgcttagatggcccatagatttcaccagcccctgcggacctctcccttaacgaagcacttccaaccggccctctcgagcccctcctcccaagcccactctcgccggcccttaatctcttcctgctcgtcgaccgtctctaccccaaagaacggggcgacgaagcccgagacgacgccgtcgaacatggaccggatctcggtctggaggcgcgtaccagactggtgaaagtcgggcgaggcgttgaactctaggaggtggacctgggggcgggcaggagaggagcccgaggtagtgggtgggaccgtgacgaggaagtcgacgccgaagatctagagtggcgcaggcaggcaggtcagcttggagaggcacagacaagggctatttggcagaccgacctcgaagcagtttggtaagagctgcaggccgacgctgccacactctacggccgccgtgatcgccgcgccggcgaccttgccgcagtcgtcccacaagccctcgagcacctcgcgcgtgagctcgccgccggccgtcgtcttccgccctccgagctcccagagcaaatggacgttggcctcgtcgacttcgccgggcgacattggcggctggaggcacgtgtttgtcagatgcgggaggagcgactcttcggctgacctgggcggcgagtatgggagtgacgagaagagggcgagcgtcgtccgggcgaggtggacagagtaggcgcccgagaggaggacgtaggttcggagatggaacttgtggttggcgggcgcggcgccaccgggcgcggacgaaggcaaaggcgagggtgcgaggagcatcggcgaggcaaggtactcctgcagggcggaagccgaagcggtcagcgagcaggttagagtcgaagagaagagaaagtatttacctggatgacaaagtggcggagctgactcatggcgacaccctgtccctcatccttatcgccgtcgtcgttgtcgccgccggtctcgacaggccgtttctcgtcctcgtcgacgtcgtcctcctcgtcgctgctctcgtcctccatttcctcaaagatctcttcgagctcggcccggctcgagaagagccggatgccctggcccttgtcgctcattcctggcttaaggatgaaccaccgcggcttgccgtcctcgtcgtccatcgcgagcgcgaggtcgtatagctcgtcttgccaaagctcgtcgagttcgtctgcaaactggacgtcgatcgcccaaccgcgcgggacgcctgcacggaggaccgactcttccatcgccggattgagcgcgcggcgcgaggcgtgcttcgcgaggtactcttggaggacgaggtgaagttgatgcttgcggatgagcgtcttgcggtagatgtagctcgacgcgagcagcgtcggcatcggccgatgcgagagcgactggatgagcgtgtgcgggaggacgtcgtagtctgcccagcaaaggaggcggtccggtgccgtctcggcgtcggggtcgaacgatgggatgagcgagaggtaagggagcgccgaggagagggcgagctggaggagcgtctcggtgtaaggcgaagggaacgagctggtcgagcggcgcgcagtgtcagcgtccatcctggagcgtcagatggctctagctcgacgcacacaaaggccgtcatgattgggtggtcggcctggcgtccgacaagaaggacgaccgacggtcagctcgcactgccgggcggagaggaagatgtacgacggcgcaccttctcgtgctgcttctcggcagacgacgtcgtcgtcgtcggaccgagagcgaccccgcccagcttctcagcgacgtctctgacggcctgcatggtctctctggaatatgtcgagggtaatggcggtcgtcgttcgagggtcgaagccgccaactgcgcccacctttccgcgcttcgtacgaccttggctcgtagcgacgacctctctataactacaagcagcacgacagatggcagcagcaaagcaaacgctcctcgtcgttggcggcaacggattcctcggtcgatcgcctatagtctggtgctcgaggtccgggttctcgctgaccttcgctcgctcttgcccgatctcctttgtcgctcaggctcggccgttgcacgcgcggctgtcgccagaggctggacggtccacagcctgaggtccgatcctgtacggcagcaggagagcgttcatgcagggaaggctgactgctcttatcttccgccgttgctggctgcagtcggagcggaagggcgccgtcgacgccggacgggtctctgccggccttcacgtccaaggtacgaccgttctgtcgattcttgatgctcaaacgagtagccgaattcagtccgtgacgaatttaacctcacggcagctctctcctccgttctgatcggtgacggcaggtccagtaccacgccggctcggccttcgacccctcgagctacgccgacctcatcggccagtcgaccgccgtcgtccactcgctcggcatcctgctcgaaggcgtcgactacaagtcgaccttgcgcggtggggggctcgtcggtggcttgcttggactcggagggaacccgcttgagcggagagggggagggggaggagggagaacgcgcaaggcacgcgctcttggtgggcaggcaccctgacctcacccaacatcgcctcttgctgccctcccagtgacttcctgacggtcgcttgtatcggatccttgctcgctgacggtcgctgatcaggctcatgctgcattcgatcgaggtcgaggccgagggtccgcttctggccctcgggccaggggtgatggtcggcccgagcgaccctcccgcgaaatcacccagcggcgccgcagggagagctcgatttccatcaaggcgagccctctggccggcgagcgagagcccttttccctcgcaggacacgtttaaccatttttataccagacgtctctagccgagttgagcctcggtgcctctcacaacgctacttagcaacaactacagacctaaccagtcaaagctcgacctaacccgtccaaatgagaaatcgttatgtcgaacaccctcatcagccggatccccaagcgctcggcctctggccgggcgacaaaggtcaaggccgaggtctctgctcttcgtgccgtcgcggtcatcgcgcgtgctggcgagcaggctccggcctgtctcaagagcgtcgtcgtcatcggccgtgcaaggtcggccaagggagccgagtctgtctctggacggctcgctcctgcggccaaaccctttggctgccccgagcagttaaaggtcaaggactcgaagccttcgatctttgctcggcctggtcggcgcatctcgtgggccgccgagctgcagcaggtcaaggtcttctcggctcacatcgctatcggggatgagcctcaagatgcgtcgcttccttcccctctttcggtttgtgtcggcaccccggtcgcctcccttctcgtggacgacgcgtggtgggaggagcaggagaagatggcggcacgtttgccgcgatctttgcgcaggccgacatcgacctggccgcggccgacgctcgcgagcaggcgtacgaggaggagatggaggcgctggccgcttctgcttttgccgtcatcgtcgtccctgttgctggcgtctttcctccctcgcagtcactcgcttgtgtcgcaacaaaggcgatggcaagcaggtacggcagccctccccctctcgtccggcggtcgacggtccaacctttcgatatggccggcatcaagcccgttccgttctcggtcgacggcctctagacaacggcggccaaggtgagtgctctcccgctctctcctctccttcgcaccctcgatgcccctgctgacctagtctgcctgctctccgtcctcctcgcagtctctctcgcgcacatcggcaccctctttcccatcggcgacatccttcgacaggcctcaagaagccggctgggtctcgaagggctctccggcagccctgcttcgactcgggcgacctggtccattggactgggcgctcggttgggccgggcgacctcctcttcctctcctcttcccctgccctccttccttttgatcatcttccgccaaacgactccctggacctgaccgcaagctcgtcagctgcgagggcgacgtcctcagtcagcgagtcgtcaggactcggcgttcttgccctatttgcctccttgcgcgtttaattcggctcggcttatcgagcgagatcgatgggcgagaatttgcgaggcgactgggtcggtcgctagtaaatgcggtcgtggtggcgaggaggaggtcgacctcgttcggttctcggctctgcttccaccaacgtcgacagccctagccccgctcgcatgctcgccagcgccatcaggaggtcctcgactgtcttgaatgcgtcccagatcaaacgcttgacgcccgtggctgagagtgtccagcaggctcatcaggagctccgctggatggtccaggagctcgaccgtcgacggacggtgcggcccgcagctgccctcgctggcgtccccgccgagcaggcgtccgccctcgagacgctcgtcagccgaagggaagcaggcgagcctctgcagtacgttctcggtacgttgctgctgctgtgcggcttgtcgtgacgttcagggactatcaggctgatcaaaagataaccctcacccgtgcctcgttgctcaaccagggacccagccattcggccccctgctcctcaacgtccgaccgccgaccttgattccccggccagagacggaggagtgggcttgccgtctagcagacctactgaagcccgatccgccggcccggatccttgacctctgcaccggcagcggctgcatcccgcttctcctgctcgaagctctgccggcagcccgtgcgagcagcgtcgacctggctttcgaagcggtcgcccttgcgacggagaacgctgagcttcacggcctcgcaaaccgctttcaagctgttgagggcgatctgtttgctgcaacctttgtcgagggctgggtcgccatgcacgggcaggccgacctcgtcacgagcaacccgccgtacatctcggccgacgagttgcgtgcccttgacaagagcgtactcgactgggaggacgagcgcgcgtttctcggagatctcgagggaacaagtctcggcgctctgcctgtacgtcgcgcctgctcgcctgctttggtcacacgtcgaggctcatgtcttctggccctctcgctttctcgcagcggtacccggctggtcttgcgcacctcgcacgcggccgcggactcgacttctacgcccagatcgctacctatttgccagccctgcttgcgccgcgtcgcgcaagtccatcggcgtcgcagcgtgagactcctccgcgggttgtcctcgaggtcggtcacgaccaagcgcgcgaggtgcaggcgctgttgctcgccggcccatctggagccatcctcgagcgggttgacatctggacggatgccttcggcaaggagcgtgtcgttgtcggcttctagtggaggattgaaagacggggcctgacgggccaataccgcaatcgggcgccgggcctgacctcgacacgattgttcaaacgtcgttttgtggcgcgccagttatcctgtgcgatacgtccaggcggaactagagcggcaagtcatcgtcggcgtgcgtctatcgggcggcccactgcaggctgtcgatctggtcggtcggacgaagcgtggcctctgtcagccatgggtcctccccccaccggccatctcaactcgcctggaactctcaaagttctggatatgggtgcgaatcgcccttcaatacgtctgctgcccgcagcgagactctcgactgaagcagggagagcggccgacctacctgctccccgggcgcttcccggcgtcaacatgccgcccatgccgtccaggatgaggtcaccggcccgcagagagatggtccagcacccttcaagcgccgctatcgtcgccaactggtcgtcgctgggtcaggaagttcggacgccgtcgtagggcttacgcgaaacaaggcggcttcggtcgagaggccggcgcgagctggcgccgagggagatactgcgtcccaggaagggacgggcctctctagatagcagtttacatgtacagatggaaatggcttggccaagccaaagcgactctccgacgactgcatgttcacccgactgagccacgccgacagagagtcggcgcagttgtagtgatgtcgcgtcaaccccaaagtcaacgcgacagggtccagaaagaccggtcgagcggagcagtatcgtcagcagtatcgtcagcggtctctcttctgacctgcctgaggtcttgaaggtgcggaaggcacggatggacgacaggaggtagtcgagttcgagtctacccggtggggaaccccaaacagcccagctcaagcccaaacagccccgtctgcacggcagcgggccggcgggacgaacccatctcgagcctcgccttgcttgacctcaacatcaagcttcatcctcactctttatcccctctctcacagcatgcggccaacccagactgcgatgggcctcttcagcatgttcagcaaggccgagaagccgttccatgacccgtgggccgcacgcgaggcctggcggtacgaggcgcccttcaagccgaactcgcggctgttcgggtgcgtcttgccctccgtcggctgcctcgagagacctggaccccgccatccgactaagctgacctccgccgcacttgacggccgcgcttggcagctaccagacgctgtggaagcctgtgctgggggccatggcggtttactgggtctttgacgaggttgtgaagtgcgtcgttctccgctcgagcttccagctcccttgggcaacgtgctgaacgagctcgtccgcccactcgctacctctgctgacttcctgatgcgctttctcgctccccagccacggaccgctgaggtcggttatctggggcaacaagcctgcccacggccacgacgagcaccactgaagcgccggacgaggtccgtctccttgctgaacctgggccgctcgtcttctcctgtctcgctcatccaaagctgacgaaggtctcaaccttggcagatattgagatttctgctagtcgagcgtccctagcaaccccagagcacatagaccatgacccctgaccagagactcatccggccgttcgtcattggctcgacccgagaccttcgcccggctgactgcaacacggcattcaacgagcccagcggtcggcacagaccgcgacgttgtctcagggagtcatgattgtgagctttggacaggctgtctggtcctcgtacgcggcaggagacgaccggccggccgttgcagcccgtgctgttccctgcgccctcagcggcccttgaagtcggccttgcgcttctcgacaaaggcgctcattcctggcagcggaggcaagcgcggggttagctgacgagatcggctggtcactccggccagagggttagcgcgggcgacgcaccctccttctggtcttcggtgccaaacatggcccagaagagcttgcgctcgtacttgaggccctgctcgagaccaacctcctcggctgcggaaacgagtcgtcagcgatcgtcagaggtgttcgtgcccgcaacttgcaacgcacctgtgttgaccgcctccttggccgcaatcgatgccagtcggcccttgcttgcgatgtcctcggccagcttgagcgccgcctcgagcacaccagacgagggcgccgcgccctctgcgtcgggaacgacacgcgagacgaggccgtagtcggacgcctcctgggcggtgatcatgttgccagagctgcaccgcgaggcgaggggcaggacgtgtcgtcagcaagacctaagagccttcgtgagagggcacgcacaggaccatctccatcgcgcgcgacttgccgacggcgcggaggagcctgggaactcacgcagacaaggtcaaaggtcagcaagtgcggaccaggcgcaggacgagcgactgaaacgcaccgctgggtgcctccagcgccggggagaatgccgaggttgatctcgggctggccgaatttggccttgggcccagcgagcaggatgtcggtcatcatggcgagctcgcagccgccgcctagtgcaaagccgttgatggctccaatgattggcttgcgaaaggccgagatgtgggtccaggtcgtcagaaagtcggtcgcatacacctcagagactgcgcatgcgatgccgggtcagcggactgatatggaaaaggctgcagcgctcgacgggaaagtacgcacgcgtcttggactgcatctccttgatgtcggcaccggctgcggtcgggcgggggtcaagagacgagttgggagggctcagccggctgtcggagcagcccgcgggcaaacgcgacagggcagatggagggcacgtaccggcaaacgcccggccctcgcccgtcaggacgacgcagccgactgcttgctcggcctcgatcgtccggagctcgtcgttgagcgccttgatgagcgcgctgttgagcgcgttgagcgcctcgggtcggttgagcttaagcagggcgaccttgcccgactcggaccgggtcgagagcacgagcggcttgggcgaggcgacggcggaggacatggcgcgggcagaaagaagggacgagcgggtggcgaggcggggcaggaacataacacgggcggtcaagcgaggagtgagatggtggtcgagatgcggtcgacagtcggctctgcgccggctcaccggcaactgaagacgccagccgtaagagggcgcgcgtgaggtcgaccgtgcaaggcgtaggagggagggagactcagacccgccgccgcccagcctctgcagtctgcagagcagctcgtcctgagcaccgtttgccagtcagctcgtacgcaccgggctccggagtagatgcgatggctccggagcagatgcgattaccggtgagatgtcgacgtggccctctcctcctcgccgtgcgtacgacccgaaagtggacggacgacgcgcctgcgccgcgcccgatcgactgtcgagagccgcccgcttttcccctgctggcttgcgttgtcgttctcatccatcctccttcgcactactctcctcattcctgctagcatgcggtctaccctcctccagtgtgcttcgcgcctgccttcggccccgagctcgctccgtgtcgctagcgccgtccgatcggtcggcacccagccctcgagcaacagcagcagcacgcctgcgcctccgccggcagccgcgccgaggacggacgcgccgggcaagacgacccacttcggcttcaagacggtccgggaggaggagaaggaggatctcggtgagtctgtgcacttgaaagctgggctcggcgggtgtcttggaccgggcagagccgtctcgatgttcagtggcggacgcctgacatgagctcgtcgagcggtcaagccggcgtgcctcggcttcggcccttgtcgagctctcgctgtcggcacggtccattgagtgatggcttcgatctcagcggcgagcggagcacttgagcgtgacgatcaaatgtctgagccgaggactgaccgcagctggcttccccctgcacctcagtccgaggcgtcttctcgtcggtcgccgcctcgtacgacgtcatgaacgacgccatgtcgctcggcatccatcggctgtggaaggactcgctcatcgccacgctcgacccgggccggacgcccaacatgaattgcctcgacgtcgccggcggcacgggcgacattgcgctccggatcctcgaccacgcgcgcgagaagcattctgaccggtcgctcaaggtcaacgtgctcgacatcaacaaggagatgctgaccgagggcgagaagcgcttccggcggacaatgtaccacggcgggcctcaagtcgagtttacgcacggcaacgcccaggcccttccggcctcgatcccgtcggcctcgctcgacctctacacgatctcgtttggcatccgcaactgcaccgacgtcccggccgtcctccgcgaggcctaccgggtgctcaagcccggaggcgtctttgcgtgcatggagtttggcaaggtcacgaatccgctctttgccgggtcagtccccctctttgagcatctgcgtcgcgtgcctcgacaaacggctgaccagccgtcatcgatttcacagcatctaccgccagtactcgttctcgatgatccccctgctcggccagatccttgcctcggaccgcgcgtcgtaccagtacctgattgagtcgatcgagcgcttcccgtcgcagcccgagtttgcgcagatgtgcgtcctccctgcacgatcagcggcggcgctctgtccttgactgacgatcgcctttctgctccaggatccgcgaggccggcttccagacgggcgagatgcgtgagggcgagggtggcgcctggaccgactacacgggcggcatcaccagcgtccacaagggcgtcaagatctgatgacgagtgatccttgaccccctctgttgcatcgaggctggtcttctctcgtcactactcgctgtcgcatgcgaaagagcaatcagactttatatcaggcacccaagccaaaagcatcagcgaccctgtagtgaaagggaagcgtcaagtcagcatgcacttctgacaagcgcatcgcaggtgagacgcacctggttggtagagggcgagtctacctcgcccatgctctgggtccgccgcttgcccggcgtctccggcggccgaagcatcgtcggcgtcgcggaacctccgtctgagccctcacccaagcggcaagcggtccggacggggctgcccgggtcctctagaacaatctcgacgtctccgtcgtcctcatccgtctcgtcctcgatgatgactgccgagcccgtcagatgagacgagctgggcggggccttcgatgcctctaatgcggcctgctgctcggccgcggcgaacgcggctcggtcgacggggaggatcgagtgccggtagcggcaccggccgggcccaaagggacactcgacattgcgaaggaggtagaggcaggccttgcggccgagaggagcgaccggtgtcgcgccaggagcgacaggcgcagacgtcgggagccgggacggtgcaaggacgtgggcaaagttgcactctgaatgactcgcaggtgcgtcagctgaagcgctcctgcgaaggcgcacttttgaagatgaggagacgagacgcaccatcgccgcgggtgcaggttccccggttgaagaagaggcaagactcggtccggaacttggggtgccgaccttcttgccgaaggccgccgctcaggaggacgccgtcagcgccgatgatggcgactttgctctctccaggatgcaggaaggcgcaggacgcgcccttggtgcatgatcctgtcccgtttggggcccagtacttacactgccgggctgaggggggatcgaggaggttcgtcagcggcagtggcggtggtgctggcccgatcgaagaacgtactcttgtacagcgggtgcgcgcttggcctcgagccagagacgaccgcgcccgtggccgtccgctccttacgtcgcgcactcggcgggacaggagctacgagtggcgttgcgagaccgttgatctggatgcgctcgcccttggtgccgatcacctctttcgccgtcgggagctgcggcacagatggcacggcgccatcggcgccgatgagggagaggtgggcaaagtcgagctcgttgtgcgactcgtcgttcaggggatctatcgagatgggcggaggcatttcgtgcttgctgtgaaaggcgacggtagaacgatcagaagtcagcctgctggcctaggatgcagagagcgtcaagatgaagtagcggataaattagacgaacaaggagcataggcttccccgggagcagtggccggccatgaaattccggcatggaacggctgtgacagacgaaaatcgagaatgtggacaagagatgcggagggaggggttggcgaggaacgatcgtcagcagggcggctgcgcagaagccaaagggactctgcggctcacttctgtagctgctttggcctcggcggccggagctccgggcatcagccgaggccctcggagcggcatggtagccagtgtagaagctttgcgagtcctgccactggtcgtaggagccgccggcgagcaggacgtgctgctgcaactggtcgaagtggaccggctccagctcgagctggggttgctggttggcggcgccgccaaactgctggtagctcagcggcgagctcggccacttggccttgttccgcagggcaaacgagctcttcttagccggatagatgggcgagatcgggtcgtcgttcgtcgggttgaacgggtcgagatcgagcgtgctcgccgtcgtcggcgtcggaggggctgtggcgtgcaaccaggagcaataggtcagccggcgggcttggagttgagcagcattggcagcagacgcactgggatgagtgaagcggcagcgagagccgaacggacaatcgcctcgctcggcataggttcggcaaggctgacctgaaagggtcaagggtagcaggaagacggagccggtcagccctgtggtttgtgagtcgccgctgctgagctcggaggcgcgtcggggccggaagcacctcctgagcggtccgaccgactgtccgaggcgtaggaggagatctcaaagggcggagcgagcgacgacatgaccgtcttgctatctgtcgatgaggagtagtggtcgggctgacggtcaaagggctgaactgccaactgcaggcatctcgtctccggcctgcgccgccacgcgcgcgcgcgcggggactctgcgccaaatgaagccagcacgtcgcgtcgaccctcgacacgtcctctcttcgcctgcagtcaacgacttctctctcgacgtcgcagccatggcgccgctcaggccgacgatcaagctccgcgccgatctctcgtccgactcgcctctgtcgtcgctgccgccctcggtcaaggcggcgtccagcgtcagcacgccgctctcgtcgccgccgccttcgcccgcgaccggcaccgctcaggcttcgacctcgcgagcggtcgctgtgcggagcccgatccataagcgacgggccgttctcagcagcgacgacgagggcgacatctcgtcgctcgtcatcctcgagtcgagcccggtcaaacatctggcgtcggtgccgcccaagaccggcggatcgaaggccgaggctgttgagctgccttacctgagcgagtcggccgagtcagcgcctgacagcgatatgctcatcatgggctcgagccaggcgatgtcgagcaacccgtctgctcagcgcttggccggcgcgtctcagacagctgcaccgaccagatcaaagacgtctggcggcatggatgacgtgcgtttctccgaatgcacctgccctgcccggtctagctgacgcgttgctatgtgcccactgcaccctggtgaccgagcagctcgacgacctcgacgacttcgactgggacgacgaagacacggaggctgagacgagtcctgtctcgtcgacgaagccaccgcaggcggccacgccaagcgtcgcctctactggaggtctgaacggcccctcgaccactgcgcagacctcagtcgaccgtccgtcttcgcctctacagccaaggacggccatcaacggcgtgcgcatttcgacgccgcttaaacttcgggccaacacgacgccgtcgaagccatcgcccctgccgcacacgtccgccgggtcgcctgccgagtccagcaagaagcagccgctgccttcaccgacgtcggtcgtcatggcgcggatcaaggcaaaggccgagaaggaggctgccctgatgtcgcggcttgtcgccacgcgctcgagcgaaaccgagcttggcaacggccgcgacgcaaagggcaaacgcagagcgctaagggacgacgacggcgatgagttcgccacggacgtcgacagcgacgacgagttcggccgtgtcggcaagcgcgggcggaagcaggtcaccctcagtgacagcgatgatgacccgctgccgagctttgccgctccaaactcaacaaaggcgtgcgtccgaacctcctgtaccgcctccggcctcattcgctaacgagcatcactcttgccagtcccaccacacgagctgtcaagaactctggacccaaggccgtcttccacgatccgattggctcgcgtctgcgtcagaaggtcacgacgtcctcgtcctcgaccccgacgtttgtctcgcgcggccaggccgtccaaggttcgaagagatcggccgtggtcgacaccagcaaagctgccaatgcgactgccagctcaaaaaagttcatggcctcgcttctgcagaagagctcaaagcggagtcacatgctctcgcgggtcagccagattcgcagcggcgggctcggcgaggacctcagcgattcggacgacgaagatgccgatggcactgctagcggcaagacccctgccaatggcggtcctcacaagagccgcccgctcccggatgctacggccctcggctcgtcggatgacagcgagtcgtcagacgaggacgaccctgcccgccctactgccaccgctgtcccgggtgggcttggcgccctcggctcggcggccgatgacatctttgccgtactcgcaaaggaccggctcgcaaaagaggcgcggaagcaagcccgacgggaacaccggcgcaagacgtggggcgggtgctgggtgcggaccaagaagaagcggcgtgcgaaggccgatgagccagccgaggcggtcgaatttgtcaaggaacctgtgcgtcctgcgcgttcgcagctcttgctctcgccttctctgttctctgaccctcatgctgccctccggtcagtgggacgtcatccgcatcgccggtaacagcgggcatccgctctttgagatgctgctcgtcgcatcggacgaggatgacgccgagcgcttcacgtcctacctcgcgctcggagcgctctcacctgcggtcgtcgcgacggtggacgacaaagccgctctcgtgacggcccttttcgagtcggcctgcctgtcgtcctcgaaccagcggtcggcgctctgcctctcgcacctcctcgccatcctccggtcatccacaccccaggcgcctgtcctcagcgagaaggctctcatccaacgtctgacgggcgcattccagggcatgggttaccggcacagcctgatcgaggccatcaatcgggccggcgatggcacgccaaagaaggccaagagtcgcggccagggcgatgtctttgatctgccgtttgaccagcggtgcaaggctgtccgggcgctgagcgcggtagtcgaggtggttaccaggtgagttatgtcgcttcttcgcctgagctcttgggttctgacgactccccgcgctcttaatcttccatagccaccgcctgatgaacgacagccggctcacgaagatgatttgcatcctggtcctgctgtcgctcgaccggacgactccggtcgacctgaagatcacgctcgagaagacgatcgcgctcgccatccattcgatcagcctcgttgactatgtacgacctaacgcactgctcttgctgctgtcgctctccgctgactccgactctgtccgcccgcatgttataggagatcaagctcagctacaagctcgctgaactcagcaaggacaacgatatgactttcaagctcggcgtcatcaatgccctgcctcggcttggtcttcgggcaggccgtctggcgcgctcgctcggaaccttcttccttggaggctatgtcgacgaggtgcgttgcctctggattgtgattcctaatgctggctgactcgaaaccgcctccccttctggtagaacttcttcgaaagccctcccgacgtttccgctctcgccgcgctcgtctcgccggatgagcctcggtcggcattcgttgtctcgtacaaaaccgactacgtccagatgatttcagccatccgcctgctggcagttgtcgtcggcgattttgagacgctctttgcgcgtgcgtacggtttgacctttcttttcgaggtgggagactgaccggatcacttcactcccgcagccgacatccctggtgccgccagcatcagccccccggctcttcagaaggtcacggccggcgtcaaggccctacagaccaacctcgcaaaagtcgagcaccgcatcagtgcgttgctctcatcttgatcccgattgtcgcgcaccggctgacttgtgcgcacctctccccagtggacgcgcgtgcgagcaacctcgaccgatcggcggccaaggcattcctgctcaacctgaacgtctccctcggctacaggtcgaccatgtttgagcgcatgcatcagcctcggcgagcccagggcgaggtcggacgcaagggccagacgacgctctcctttgctccggtcgcaaagtaggggcgaaagcccgttgcgcgcacgggcgcttcgtccgttgtcccctcatcgaagacccctccacccattttgtctgcatatctcctatcatcctgttttcctagcccatgacgacatttatgaccctttgtttcgagagttcgacgagtcagcctgctgccctcatcctgtccgcgcctgtggcccgccttagggaatcaaaaatgagtttcaactatcgatgccgccgcgcccgcgaggccatctcgactcgagcacggcagcttgacctcctcagcagcctccttccctttccctccccttctccgctccctctttctctcttacaatgttccgctccgccgtccgctccttcgctgccgccgcctcgcccaaggtcgtcgtcagtcccggtcctttcgtctcgccggctgctcgaccgcggccagcccggcgtcctgctctgcgccgagcacttccgagggctgacgctctctccgctctctcgctgccctcgccctccgcaggtcccggtccagctccagtcgctgtcgggcaagtacgccactgcggccttcaccggcgctctctcgcagtcggagcagacgctcaagcaggtcgagaccgacctccaggccatccacaagctcatcgaggccaacgacaagagcgtcgttttctttggtgcgtctcgtctcgaccttcttggcagcatgcagcgtcccggtcggccgtagcccacttggcgacggatacggctgcaggcgactgttcggatgcctccaggaccggggacgtcgtgatgctcaaggaactaggcactgacttctgcgctcgtcgtttcgcttggcctggcaggcaacccgaccctgactgctaacgaccgcgaggctagcattaaggccgtcgtctccaagctgcccaaggcctcggaggtgcgtgacgaccccgcttcacgcctcttacggctcggcgtatatgactgaccttcatcccttgtctgctcttttcctcgtccggtgccggctcgcgtctcgtcgcattcgctcctgcgctcgatgaacgcaatctcctcggcttcaaccactcgccccggtcttcgtcttccggcgcccgcctgtgtctctttcgcactgccgcatcgtcacctgttgctctgtaaccctcggctttcccgtcgcccgctcttccgcgacccacctcctcgactcagatcacctccaaccttctcaacgtcctctcgtccaacgcccgcctcccgcttaccccggccgtccttgccgatttcttcaccctgacctcggcccactctggcctcctgaccgtcaccgtcacgtcgtcggcgccgcttgagtcggcgacgctccagcggattgagaaggcgctcaaggcgtcggagcaggccaagggcaagacgctcaaggtcgagaacaaggtcaacgagagcatcctcggtggcctcatcatcgacttcggagacaagacggtcgacctgagcgctgccagccgggtcaacaagctcaacgcgctcctcaacggtgcgtcttctcgtcgcccgccctgaactttggtggtctgctctgcctgccgttttgctcgctgatcgccgcctcccgaccgtttgcagcctccgcttaaatcgcgggtcagcttgacagcgcagtggcctcgagggtcctggacgacgcaccagggcctgtgtatagagcgggagtgaatgagcaaacgatgagatcgtttaatcgttgggtcgcaaccttgcggcagccgggcgggtcattgctgttgcagaaatcgggagagcgggactcagagctgggggctggtcggtctgtgtgcagggcttgagccgggcagcgcgcgacgagcccgcttcgcaacggcgagaaagcgcacgaccgtgcccttatcttctcctcaaagcaggcacgctttctgcgtgagagtgcaagcggacggggcaagagacatcgtcatcggcgatgaggccgatcgggtgcactggcagggttcgcgcacgagcccatatcggccccgccggatcatagtgcgtcgttgcatgcgacagcaaggcgaggatagactgccggctaaaagattggggtatggcgggttgagagcgggaggctatgatgccaccagccgatcgatcagaagtcagtcgcacgaccgccataggtccactcgcggtgaagcagcggatccttcttgggcccgccgatctcgcccgtgacaggattgcgctcgccgtcaaagtcgggcttgggcgttcgccgggcgtctgggtgagcctttgattcgatggcacccgagacggcggcggcgaccttgggctcctggtcgagcggggtcgagaaggcgccagaggtcgaggcggccgcaacgagacgttcaaactcgcgctgctcggctcggggtagcttgggtggtccgggtcgggacgtcggcaggggcttggacgcagaggccagtggtcgggaggtcgaggccgaccggctgaggatggcggcggacgacgaggacgaggtggaggcgaaggtggcacgcagcgggagcagcgagcgagcgagcatcgtggagcgtgactgtgcgagaacaacggtcaggacaagaaacaacgcgcatgatggcagcagaccgacctgcctgtgtagttcaagtgtcgacgggtttcgagggcaattcgagggatgtcgagagaggatcggtgtcgagaggtggatcggacgccggcggacgagagcgacttggcttgcggggtgaagaggcgaccctcgacaaccatctcgccttttcctgccctccaaccttctgcaactcacagctgtcccaggagccagcacgacggtctccagctcatctcatccagaagtcgacgcgaaagagccgcactggaagctcgcgctttcccggccaacctctacgccggctccgcctctgacggcgcctctcgccttgagcttccgaccgcctctccgactcaaggctcgagcgccacctcctcctccgtccctctccggcatcgtctcgcacgatggtcgtcttcgacatcgacgactgcatcgccaagctgctccagaagcggctcctcggcgaggcgctccttcgcgagatctgcgagaagacaaaggaggtgctgatgcgcgagtccaacgtcgtgcacgtcgccgcgcccgtcaccgtcgtcggcgacattcatgggtgcgtcctgcgtcaagctctgaaaggggaaggatgacttgaagaggggtttgtcttcatgcggccttcagagggcatcctcagccggtttgtagccagacgagcggccgccgctgacccaaggtcgcgccttcctccgaccctcccgagcagccagttctacgatctggtcgaaatctttcgcataggtggctttgctcccgacacgaactacctcttcctcggttcgtacctttgcgatggcgtgccgctgcggctcaagcaggagaggctgaacgactgcccttactccacaggcgactacgttgaccgaggcctcttctcggtcgagacgatcagcctcttaacgtgcctcaagctgcgttatccggaacgcgtgcagctcatccggggcaaccacgagagtcgagcagtgacgcaggtgcgtcaccttcctccatccctgccccttgaagccgggcctgacggcgtcgatccgtccgatttgcagacgtatggcttctacaccgagtgtcatcgcaagtacggctcggcggcagtctggacgtacttcaccgacatgttcgatttcctgacgctctcggttgtcatcgatgaccgcatcttctgcgttcacggcggtgcgacacctcacccgactcgcacccgtcgctctctcagcccagactcacactcgtcgcgcgcttgtctttgcaggtttgagtccaagcgtccacggcatcgatcagatcaagatcattgaccgatttagaggtgcgcgctgacgagaagggccagcgaaagaacctggctgacggagcggcgtcacatctacagagattccgcacgagggaccgatggcagacctcgtctggtctgatccagacagcgacaaggaggagtttgccatctctccgcggtgagtttcctcaaacgttcgctcgctctttgcgctcgcctgctgactcgttctgttctgctcgcccttgtagtggcgccggctacacgtttggcgcgcaggtcgtcaagaagtttctcaacctcaacaagttcgagcacatgctgcgggcccaccagctctgtatggacggctactcggagctctttggcgacccgccgctgctgtcgaccgtctggagcgcgcccaacgtgagcctgaatgctcagcctcctatcgttcgcccatcgctgaccgtggaaacctcactcgtcttagtactgctatcgatgcggcaaccaggcgagtatccttgaggttggcgagaacggccagaagaagtggaacgtattttcggccgcgcccgagaacgacactgacggaccgaatcaggcggctgcccagatggcaaaggtgcgcacgcaaaggcttccgcgcttaacgcttgcgactgatgacctgacacctctccgtcacacaggccgtccagtacttcctgtagcacgaccgaccgaaccggataaaagggctcgcctgcgcctgcgccggcggcggcggcttcctctttcgcatgccggtctccctcttcagctggggaccggcctcaacctgtacgacgcattacgatcttgatgacaccgacctttgcgcccgacgatcgatgtggcttcgtacgagtggcgtcctttgttctgcgaaaagagagactcgcgctccggctcgcgcgctgcgcgcgctccagcagtcgagcttacccttgtgtcccccctttagctctccttcaccgcctgccttccttctctccagacctttcagcatattctagtcagcccctccccggactgccctctagctcagcatgggcgccaaggccactaaaggttcggccttcgcctcagcgacgtcagatgatcgcgtaattgctgccgccgcctgcccggcggatggagagctgaccaggccaagccgttcgcaaggcaaagcgcaacacagccgcctttgacgcctctctcgagcgatcacagcacactgggaagacggccgcacagcgggaagaggtcgcaaacgagctcgcaacgctcgccgcgaagctccaggacaaccggacgaccctgctcagcctgctcgcgacagtcggcgaaggcacggccgacggccgcgaactggtcgcttcgaagacgtccctggacgaggtaagcagctctgttctggtgctgcccttggctggccgacagtcgtaccagtcgcagcttgctcaccgtcgctcgccctcgtgccttcccttagcctcagcgtttggcgcagcatgcgacctttgccgaggcgcacgccaaacgagcgaagcccatcaccgggatgatcgatccagaagagtagagtatcgtcgacacgcttgcttggatcattggcgcgacctcaaagctccggcagcagctcgcacggttcgattcgacgatcgagcgtgcgctgagctccgtgtcgagcgccaagacggtcgccgaggaggtcaagcggatggaggtcttcaacgacttgctcggccggaacgaggacggccagtggcatgtcgagcggctcgagcaggtcgagagtcgtttcactgcgaacgagctctcggttgagcaggtcctcggcctgaaggatgccgtcgacaaattcatcctctataacgaggtccgtgcgactcaaccttcccacgtgctccgcgtcttctcctaatgctgacctctgcaatctgcgcctgctgcagtctgccggcttcaagatcgaccgctcggtctattcgaccctgagcttagaccttcaggcgccgaaagtggcgcccaagcctggcaagcacggcgtcacctacatccacgattcggacgagaacgctgcggacgagccagacgtgtacgaccgtatcttaatccaagacctcatcgcgccaatcagcatggccgtaccgcgcgaggacgatggctgggaggtcgtcgagaagagtccgtttatcttccactcgctccactcccccagagagctctccgctgatccacgaaccttctacagagccgcgcgttcctaaggagcaccagctgtcgaagttcgagcttcctgaggagcgtgctgtgagggagcagcgcgaacaagccggccgcatgccgccaaaggtttacaccgcgtacgacgacgagatgcccgtcagcgagcggccacgcaactattgcagtgagtcggccatgccttcgctctcggttgcctttcagacgcgcgtctcgctgacccatgagctcatccgccctctagccgtgacctgccgggaatgggccgtccgcggcacctgtttttttttcggcggcgcgtgcacctagtgcgtgaccgcctacttgcgctatcaagtcggagagcgataactacccctcagcgtactttttaccatcgccagcctgcacggcatccccgaagactcgtcgactggggtcgatctacgcctcgtcgggccagacgaaccccttcttccgcagtgcgttcttgccaccgttgcgacgattgcgagctgataaaacttgtcacctgctaccaatctccagctcgcatctgccggcgctggcagactggccactgcccggacggcgacgatgagtgccgttacctgcactcgaacgacccgcgagaccgccagcagcccagggctcagaagccgcctccttcatcagccacgctagcaccgcaggctgatgcctcggatgaggagaagctctcgccccgagatttaaaggaacgggcgaagatgccctgcaagtggcatgcgtcaagcagcggcttcgagtacgggcaagactgtcacttcaagcacacagggcagcaccctccaataacggaagtcgacgagctctacgaggcgaacaggtacaaggagcggctgcgctcaaagttttagagttagtcggcgattgccggccagctgcctccacattgtggttgctgattttgcgaccttccgtctcccttatcagccgctctttgcgacaagttcgagaccctggccggctgcccttacaaggacacgtcccagtatgcacacgaagccgccgagcttgtcgatccagggcagtctccaaagctcgagtatgcgtcaccggcggcgcgtttcgacctccaaccgtccagccggccgaatctcccggtcgtcctgcctgagcgcccgcccagaagcctccggcgcccaaagtgcaggcgacgaagggcaaggtcagcaaagctgcccctgtccccgtcgttgcatctccagctgtcgtcgccgttccggccgagcgcgctgcctctccgagtcgggtgttgcctcacgaagagcctcccgctccggcactcctagcaaacgtcgcctatggcgcttctcgctctgcccgcgtcgagcagctgtcccaggaccccgtcatctcgggcctggtcacgggtgcagggcctgccttggtcaactcgcacgtcgcagcaacctcccagtctctccgccagcagcctcggtccttccctcgatgacccatccggccgcttcactcctgtcgccgccaatccctcagccggcacgcgtcccgtcaatcgaaccgacgaagccaaaggttcagctgccaacagctccgtctacgctagctccaacgccgcccgccccgcggcctttccgcctcctaccgctcggcccgggagcgtacctcaacaatctgctaatgggcttgtgcttgaacgcccccgcttgtctggctcggcacaccatcaactcggacgcccacgcggcaggcgtcaagcccttgctcggcgagcgggcttgcatcaacgacttccttgccggcgcgtgtgcaaacgggacgtcgtgcctcgcaagacaagctctcagcgaggatgactacgccactcagcaggcggtcgtcgccccagtcgcttcagcaccggctccgtcgcccaggcccgttgccccggcccagcctttggcagaccatgcctctgccggccagtccttcgccaataacggcaccaatcatgacttccgagccatcgctcgtcccgtctcgagggtacgtccgcttccgtctcactcgaccctaagttttgctcagctgatcgaaaatctcatgcgaactagaaggccgacgcagctccggccgcgttcgcgaccgcaccagccaccgccgccgctgcagcggtcaacgaacctatattatctgagccgagccgtcgctgacctcgtcatccttgacgacgacgaggccgaggccgatcttgaaaaagaagcctttgacgtctctgattctgacgacgagtagtccgacgcggacgattgcgatgccccgtgctgcttgttaacgacctgtgcagtaacggcagcagcgggcccaaacgaaaacaacagtggagcatgacatcgtgactggatcgggcgtgcgagacaggttgcgcgggacgaggaagcaaaagcaaggagaagaggaggcagcgtggtgaggtcgtgtcgttcggatcgtgagtgaaaggcgcgtcggagcggtttagtggcctgcgaggagagatgcaggagggtcagaagcgggtcgactagccagcgagagagagggagaaggacgcactgatgtactggactggatgggccgagaggagaggagcaagttagctctcaatttctggatgcgatgcggcacaatccctacacgagacgcacagacgtaggagacgtcggggaggcccgtctcggcccggagcaggtcatcgtgcatgcccttgaggtcctcgttccggaagtggttccacctgtgagggcgtgaggtcggtcagctttggctcgacgggcgctgagcagggcaacacaaagggccgcacgtgctcgtgtcgccgtagaggagggccggtgccttcttaacctgcttgccctgcatgcaccgcttgcacttgaacgtgtcgtgcgtattgcacgccgtcttctcgtcaaacgtgaagagctcgcggagatcgttggccgtaaagtggcgctcggtgctctcggcattgtcgtcgacaacacaggatgagagcgacatcttgtgcgatctgtggatggcaggcggtgcacggtcagccagtcgtctcggaaacaggaggctaccttgaagccagcacgcactgccgctggaagaccttttcctcgatcgtgccctgatatgggaaaggaagacaggtcagctcgctgtctcgatcaaacgccagtctcgcaagcggacgcacggtcgagatgaagcggtagacgaagcactctttcgtctggccgtcacgccagacacgggcgagcgcctgctggtcggccgccgggttccagtccgggtcgaacaggatgagccgattggcgccgacgaggttgatgccgcagccgccggcctttgagctcaacaggaagacaaactggccgccctccgggtcgttgaattggtcgacgagcttcatccgcttggggatcgtcatcgagccatcgagccgaaggaccgggtacttattattgcggcacatcgtctcgaacaggtcgagcgtctgcgtgtagttgctgatgaggacaatcttgtcggtcgtttcggtccggagtcggtggaggaagctgtacggattaacggccacgtcagcaaagcgcctcggcggtatctctcaaaaggggcagactcaccgctcgaggacgaggaactttccgccatactcggcgtggaccgacttgcctcggccggtcgcgcgcgccttctcctgtaggtagccctcgggaaggaactcgtcgcagccctcgaggtcgcccggcaacttgagcaggtccgggtggttgcaaagcttcttgaggatgttgatcgctttgagcggctgcgagccgacgccgcgcaggagcttcttgatctcgggcgatttgatgaagtgccggtagagcgcaagctggagctccgagagcccgcaaaagacaacagcctcgtacttgaccggcactgagtgagaaagggacacgaggcaggtcagcgaactgtgaagagaacaacgctttgttggcgacaggagacgtacggtacttcgatagcaggtcgttggtccgccggatgacaaacttgttaaccttttcgccgagctccttgagcttctggtcgctccgttcgcggtccttgtcggtcgagtcggcgtcgcggcccttgaggatggccagctcgaaattcttgcgaaagtcgagccgggtgccgaggtagttggggttcacaaagtcgagcagagcgaagtactcggataggtcgttctgtcgtgcgtcgcaagatgagaggggtcagcaagtgcagtgtgcctcgaatgaagacgttgagacgcacctggacgggcgtgccggtcaggatgacgcgccgcttgcagttgatggccgtcagcgcctggaacgtctgcgagtctgcgttttttaagcgatggccctcgtcggccatgagcaggccgacctcgcatccggcgagctcctcctggagcgaccgcagcgtctcgtagctgacgatcatgactgagggagcgggcaaggagtcagccctggacgacggaggtgaggagggatcgggcgaagcgcaccctgctgagtgatctgccggcccttggcggcgacccaacggcggacgttggggatcagaatcgtcttgccgcccttgccatcgacgaccatcgggttgatgacgccctcgccgagccacttgactgcgaggggccgagagcgatggtcagcgctaacgaccgtacgtaaagtgcacaacgcccaaccggacgacgcaccaagctccttggcccagttcttgacgagagtggacgggcagacgatgatgcccttgtcgacggtcggcttacccggaagcggcgactgcttcaacagcgtctgcaagagcgcgatgcactggagcgtcttgcctggagcgagagcaagtgaggaaaggaagtcaggctgaggtcaagcgccgtagagtacgcgatatcgcacgcaccgagacccatctcatcagcgacgatgcagccgaaagcatcagaggcgagcaggccagtcgtgcagcggtagaggaactggcgacagcgcaggcgggacgagcgagatgaggtatgcgtgtcagcaccctgcgacgacgagactttcatcaaggagctcggctaggacgcaccttcacgccctcgatctgatgcggccggaggaccttgctgagccgggggtcgatgacgaccgggaccttcggcacctccttcttcgcgcgctcgagctcctccttgctcttgaggccgagcatctcgcgcaggctcttgtgcgggttcggcccttcgatccggagcttctctgcctttgcctcggcctcgagccgttcagcctgaagccgaagcgcctgctcctcggccgtctcgagcaggtcgaccgtcgggtcaaaaaggacgatcgcatgttcggccatcgggtcgtgcagcggccgagggagcagcaccggctggcgccgaacaccgagcgagacgtttgacacctggtggacgacgacctggccatcgcggtcgacgatcttggggatcgagaagctgcgcggagcgggcccgggcgcgaggtggaggtgccgaccgttagcgccggaatgctcatgccgccgacaacctcacgagcttcggatgaaggagcgactcacccggcgcgagcgacgttcttattgcgtacgtcccagacagggaacttcttgttgatgttgatttcggccgtcggctcgccgttctcgtcgagcgggaccggcgcgttgatcggcagcttcgcgccggtcgtcttcgccttcttgcgcgaccggtcgctgtcgctctcgtcgtcggcaccagcttccttgtaactcttcttggtcttctgttgggtggtgcgacggcgaatacgagatcgtcagtcgctgggcaggagcggagggagaggaggaagcgtcggtggcgacgacgcgtggtggcggcgaactgaccttgcgcggcgggagggcccggtctggccggcggttgataaaggatggcgccttgaacgcgccagcaccaaggagggcgccaaagccgccgccgagagagttggactctcctgtcttgcgtcggagcatcgtgttgcaggtgagggaggatgggtgtcgagaggctgcgccctgccgttcgaaagcgggcgcgtccagtcagtggttacgcttccgtcacgaccgggttacgcgctccgaggcccgaggcacgcaacgatgtgggccgagccatctcgccgtcgtcccctccgactgccgcttcctcctcctcctcgacagcttccgggcgctcgccaggtcatgccatccttaatcagctcgatccgaattcgtcagtccctgctgcaaatcctcgtgcttgggctccttgactgacgcaatgccccgtgacactgccatctcactcctcaggcctgctcgacaagctcggtagcctgtcgcccggcgggtggaagacgctcgtcgtcgatggctttgcgcgcgacctgctcgaccacgtcgtcggcgacaacgacatcctcgagctcaacgtgaccggtccgtcccactgttggctgcgacaaacgtcctctcaatcatgctgatcccaggctctgtcttcctcctcttgcgcgcgcgtgcagtgatcgaccccctgcagtctgcgcgcaggcccgacccgtcgctgccggtcgtctacctcgtcctgccgacgacgcaggccgtccatcggatcctcgctgactttgcgagcccctcgcctgggtacgcagccgcgcacgtcgtctttctcgacgtcgcgcccgacgcgctcgtcggcctcctgacggccggcattccctcgatgcgactcaagtcggtcgaggagctgtttctccacttttggccgcgcgaacacggcgtctttctctcgcgccagccgtggtcaacatttacgctctttggcgcgccggcgagcagccagctgaatgccgagattgcaaaggacgctttcgacgacgacctcgtcgtcatgagccgaaccattatcaacctcctcgtccatctcgcagaggatccagccatccgctactacgccccgcttcatcacggcccgctcggtccactctccgccgggtcctcgtcgtcgacaggcggaccgaccgtcgcgactgcagcagcacctgcagcgaccgccgcgggcagcgagcgctggcggtcggccctctcagcccggtcaagtgcgctcggcgctggctcgggcaagcgcgaggagcgctttgtcggcgagggtgtcagcaagttgttagctgaaatgatcggccgggagatcgccgcgctgaagagggtcgacgacgggcttttcgtgcgtgccttcccctttgatcggcgagaaatgacccgcggccgccttctgacgctctccctcccttgtgacagacgcccaaagggtcgacgtcgggtctttcccctcgaccgaaggcgaccctcttcgtcgtcgaccggtcgatcgacccggtcgcgccttggccgcacgagttcacgtaccaggcgatggtgtcggatcttttgccgctcgaagacggcctcaagtaccggtgcgtagtgcgctagtcttcctgtctcgctcgctctgacaccccgcggtttgccctgtagatatgacttccaggccgcgcatggccaggtcgaaaagaaggacgcagtcttgtcggaacgcgacggtgtctggaccgacgttcggcacctgcacatgcgtgacgcgatcgaccgactcatgggcgacttcaacggcttcctgaaggagcacggcggcttctcggcgaggtgcgcctgcctctgccgggccctgcttcgccaatcggttgacctaacacctaccgcttgggccctgcagagccggcgccgtcacgctcaacgacatgaaggacatgctcgctaacctgccgcaattccaggatctgcgagaaaaggtgcgtccgctgcgctcgaaccatctgccctcgccctgctgacagacgacctcggacagttttcgctccacctgagcatggcgcagtcgtcgatggatctgtttgagagcaaacggctggccgccatcggtatggtcgagcaggtgggtcgcaggctaccctcaatgacaccaagcctggacgctgactgccttttctcaaccgcagaactgcgcgaccagcgtgacgcccgagggcaagacgccaaagagcctcgtcgaggacatgatcccgctcttaggcgagaacgaggccattgtaacgtgcgacctctgggtgctgcttctgcacgcctgctgcaactgaccgtcaacctgtccttccctcgtcctcacagccggcttgacaaggtccgcatcatcgcgctctacatcatgtacaaggatggcgtcccggacgaggaccggcgacgactgttccagcacgcaaagctcaacattgccgagcaggacgccatcaacaacctcgtcctgctcgggcagaaggtcgtcaaagtgcgtcttaaccccccttctcactggagctagaccctgacaaccgcccctgcattctgcagaacccgggcgagagggaggcaaagcgcacccgcttcaagcagaaaccgtcaggccaggaggaggagtacgagctctcgcgctacaagccggcggtccggacggtgctcgaggagcatgttgccaaccaactcgatggccagctctttccttacctgccgtcgaccgatggcgctgacgccaacgggacgggcaagcctgccgccatcgttccctcatctttcagatcggcaccgacgcctccgccgggcccgatgcagagcgctagcggcagcctgcgcagtcagcgaccaaactggcatcgggcgggcacgacgggcagctcgatcgcctcaagcacgacgggcgtcgggagcttgagagacgggtcgaggggaccggcagcgttcaacggtcgcgacgccaacaggcagcggcttatcatctttgtcgccggcggtgtgacctattccgagatgcggagcgcctatcaggttggccaagcgctcggcaaggaggtcatcatcggtgcggttcagcacccgccatcttcgaattcgcgaattttgctgatttctcgcgccttgccgcatctctcaacccaggctcgactcacatcatcacgccggagtcatttatcaaagacctcaagtcgctcggcaagcccggcatcggcgcccggccgcccaatttctacgctctcgacccatccttcccgctcgaccaagtccagcctccgcgatcggaagccgagcgcttccaggtcgtgctcgacaagatgcattggacgacgtttgtgccgcccttgctgccgcccccgcctccgtcagtctcggccgcctcttcgggcggcaagggcggccgcgacgtccgcatggcgagcccagcaccgagctcgacctcgagcggccacggtcaggcagggccggcgccgccaggcaaggaggagaagaagaagaagaagaagggcttcctttcgcgcttctgatgcgcttcgcccggccaacctgcgcacccccgccgacgacgatgatgacccttaacgagcagacgacacactgcagacttggcccggtccaggacgatccctagtcggttgtcgaggcgggggcgaggcagacgcaaaacgagttgaggtactggccgcgcgtgcggatccggacgacgtcggccgagagctttgcgcaagagccggagaggcgtcagttgcgggatcgcggcacggctttgctgacctcaaccgacattgacaaaactgctgacgcggtcgcaaacccagtgccagaagggttgagctctcgccgtgagctccctagcctgaccgcggactcaagctgcatcagacgcgcggccaacggcgccaacagcacgcatggggccctctactcaccgagtcgagcgagacgaaccagggcgcgaccatctcgaggacgacggccagaccaccttcgccattctcgacgtcggagacagcaaatcttggccgcttggcggaaggccccgtccagacgccgcaagaggggtgccggctgacctcgaccgctcgagggacgagcgtttgagcaacgagatcgaccacctggccgagacgtacgccggtctgatcgtcgacgagaagaccactagtgaacggccagctcccttggtggctcctgatgttgacgcggatcgatgtcgcagctggctgagtagcccactcgtcgcggccttgcgcggcgcccaggggtgacggctctcgatctaggtcggattcgagcgagacggccgtctggcgtgccatattgaggccaagccagtttactcgactgacgaggacaggatgcacggccacctggccgcagtcgaggactggtgtgttgaccatgtcgccagacaggtcgagacgtggggcctcgcgaaatgtcgctcggaggagcgccggatggtcgaagagggagctgaacgtccgacagacgtctcgcagctgccgcagatcgtcatatggcaggaggaggaggatgtcaaggagaatttcggaaggaagtccggccagagtgggatggatggccgaggttttcgccgggacgagcgtcgtcgttatcgacatgttcgctcggacagctgaccgtcgtcaactcgatcatcaacaagagctcaatgcactcttcgtcagtcggttgatggtgagacacgggaaggaccgcgtgaagaggcttgcttccggcacttggtcgacgcgcctcgcggcaacaagtgctttctccgattgcgacgagaggtagcatcacagctcagcgggatagatcgggataagcagaggaggcatgcttgagttcacagtctccctcgctatgccagccaggaacccgacatcgtcgtgtcatcacgctcacgcgtctcctgctgcgtcgactctggcgcgacgatcgcagccatcggctgcgcagcctcgccgaacactggcgccggtctcgagccatcgtcggcagacggctcgacggttgaggtgacggtcagcttcaacggaaccttcggccggtgggtcgtgcgcggaggagggcggagtgcagcagcaacctcggggttgtattcgtcgacctcaagccggtgccgcgaccgacactccgagccgtttgcgcagcgcccgttgaggacgtggttaaggcagaggggctggccaagcttagagtttacgccgaaacggaagacgtcgatgccgaggacgtgcctcttgctgcagcccttgccgttcttgtgaaactccgaccaggaagtggtccgggcagccgtcaagcccgagtggcaggcgtcttttcggagataaggcagggtccgaggctgtcggaacgtcgaggtcaagtggctagaagagggtgcggtcaaccatctgggggccgtcctgttgcgagaggtggcatcggtcaggatgaggatgcgagggacgcttctacgccgaggacgcacctcgtcgaggtcaacgatcttccgcagctttggtccagacggaggatcgtctttggcttgacgcttttgcaaagcagcagccgctctgccgtgtcaaggcgctcgctccacagcccaggcacgttcttcgttcagctcgaggaggcggccgacggtctggctccgatcttccgtcaccacgctcgtcggttgagcgtttgggtcaaggacggcgtcgaccgtggcggtcgtcgcaccgatctgccgtcggattgtcgacgctgtggagaaagaagataagggagcgggcgtctgcgtcttcgcgctcggccgccgtcggattcgtgccggacgcaaagacagcgtcagagtacggcgtccgcttgagatttgagtcgtactggaggatctgatcatacgctgtgagaagaaataaagcttcgtcagagacgcacaccacggctgccaagcagagcagaagattgcgcaccgtctcgacctttgacttgctctcctctatcgcgacccgctcgatagtctgggtcccgcaagcgtccaagagcgtaatgagagcctgacggcttctcttgaggcgactgctggcatcgcgaagctccttggccgtcttgtcctttgcccgcgacgagagcgtggtcgacttcttgagcttgtcgagcagggtgtcgaacttggtcgtgtcgtcgcagaccttgcacagctcctttcctgcgggcagggcgcggcaggaccttcagcgacaaggttgatcgaaaacgttacgagcgagggacgcacgcatcttgctgcggtctgcaaaatagaggtccgcgcgcctttagacaccgagctgctcgcctcgtacgtgcggacgagaagaaaggagagcatgggagaagtcgtcgagggcgtaaagatgtgcagacgtgagggaagacaggagcaggggtcgttggcgcaaggggagaagaaaaggggcaaacgacacggagctgcgctctcactcgtcctccgagtccgagtcggggacaaaaaaggtcgtcgcgttttcctcaatctcgaggtcaaaggcgcccttggggtggatgtcgaagcagacctcgtacgggcaggagccggcaaggaagaaccggcagcaagaggctgcgagaaggcaggagagaaggacgagtcagtcaacgtacccgtcgccacttcagcagccacgccagacgacgcaccgcggaagcgtgggtcattcatgcgcgggtcggtaaacgagcggcgcgtgttgggcgcaggtggtcccggctgctggaccttaggcgccggctcaatggccggctgacgttctttaaagcgctgcaaagcaaaagacgaaaagtcagcggccgcaggccgacagagagcgggctgccatgagaagggggcgaacctgcggtatcggcgagatcgaccgcgaggcataggcggcgagtgagtcgcggtagtctttgtagtgctggcgttcctccgagagcgagagcgccttgctgtttgcttggggcgagttggagccgaggggtccgtagtcgctctcggtcaggcggtgagacgccttgcacgccgagccattcaggcagaagcccttgaggtgccagccgaggcaagctgttgggcctagcagcgggaggactccggccgcgtggtcctcggcgatgagcgtgtggcgcgaaaggcaggttgagccgttgagacagttgccctggaaaaagtggttgaggcagccgtttgcgctgagcggcaagagaccatcgggcatgcgagttgccgcgacgatcgggctgccagaagccggcgtcaaagggctgtagtcgatcgagccggaggaggcgtcgctcgaaacgctgcccgcgtccgacatgtgcgacgactgggaccgggtgctgcgcgagtcggacgtcgtcgtcgatgaggcggccttggggacgacagaagcagcgactggcgtcggacggggagcaggcgtcgggcgggttgcagggcttggccggagcgcaggaacagctgccgacagggcgatctttcgcggtggcggcggcgcagcgacggctggaggtcccgacgggagagccttgctgacgggagcgagcgtcgtggaggggacgacagagacggcgggggactgtatcttggctttggcgatggaggcaaacgccagcgttggcgaggtcgaggtacgcggcatctccgcagatgacttgacagcggcagtcggtgccggggcgaccgagtctggcggaacgtcaacgtcctcgacggcgagcgccgggtacttcttgccgatgaagtcaaagagcgaggcgcccttcgcctcgacagcgttgtgttggaagaagcagtcgcgccgcttgcaaccgccgacctcttcctggtacttgcacgggattttgctgcacctcgccttcatctgggccgtctcgcgctcctcgcggacgtcgacgtcggaaccgggcaagatgtggaggaagctgcacgagtcgccgtaggggcaggatcggcgggcggagaaggttcggcaagggatggctgagttcgcgagggagggacgcagcccaaacgtcaggcatcggcgagaatgaccgagtggcagatcgagaaaggactcacatcggaggttgctgctgctcttcttctcctggccgttggtcttgcccttgctaggggccgccagctgaggcttagtttcggccaacgtagcctgagcccgggccgccggaagttcagccttcgacttgagcggcggccggacgtcgtctggccgaccgccggcggcagcgggcacaatctggttctgctcgcgcaagacaccgacagcctgcaaggggttgaccggagagacttccttggcctgaggtaggtcgagcccaaaggaatggtagagcgagcggtccgagtcgaagccttcttcctgtgaaggagaggcgggacatgtcagcggggccaacatgtcgcaggcggcagagaaattggcggacgaaccgcgttcgagtcgacaaattggtcgatgaagtcgccgagcgcgagcgctttctcggcgtcggcgtcctcgttcagtagcatgcgctctatcttgtcgagccgctcaatgtgccactcgcgctcgttgttgaggtcgacgattcgttcagcccgctcggcctcgtcctggtcctcctcctgctcgtcggcccggagcctcgcattcttggcaagcacgcgctcgaccgtcgccgagtcgacctcgacctgccggcggagcttttcgatcgtcgtcgacagaaactcaagcgccgcgcgcgttgtctcctgctcggccgtcaggatcgcctcctgagtgagcgccttgtccgaggctggcgtcttcttgacgtcggattcccattcgatctcgcgctgcattcgctgtttagagttgaaggacggccggcggtcagcctcttaattgacggagagggctcgagcgtgcctgagcttgcaggcggccaaagcggagcagcagcggcgcggtgcgacctcgacgcacttgctcaatctcggccttgacctcctttatctcggcaacctcaggcgtgtcgacgtggaagctcttgatgagatccatcagaatctgtcgcgagcgctggagcttgccgttcgtcgagcggacctcgacgatgagccgctcgcgattgccgcgcgagaacggaccccgcgagagggggccgtacggcttcttggagacgccggggacgaccgccggggcttcgtagtagcgttcgagcaggccgtcaaagatggcgatctgctcgcggaccttcttggtctcgtcctctgcgggtcgggcgggggagaagacaggaggcggtggcggaggcggcggtggcggcggcgagggagcgggatggcgaggacgacgcgggcgcggccgcggcgggcggtggcggagcgagcaaggcgttgagatgagcagtaaaggacgaggagagcatcgacaatggcgagcgcgaggaaataaggcgtgacggcagggaggagagcaaggcgggaagggtgagatgagggtcgagctcgggcggtcagcgaccggctctctgcttgcctctcccttcagcaacggcccggaacgcactcttcgccttggcgagggcggctgccttgctcgacatggtcgacggggcgggcgaagggactaagcagagctagcggagaggtgggtggtgggcagagggatggaaggcgagagcagctggcccagaggcttgccacggcgcccgccggccctgtgaacaaggcacagcgcgcgcccgcgggacggtccgcgcagcagccggcattcgaaagaggggcgccgtttcggcgcgtgaagcccctttgatgccggcaagactcggcccgacgggtcgctcgaccgaagcttgcgtgagctggatgggaggcgctgcataagtcgagagctgctacgtagaagctatcagggcggcgacacatctggctgcgggcctgggattaggcggcaacgctcgtgtgcggagagacgtgaaaagggagggagtgagagggggtaggtcgtgagggtcgtaaaagaggtggctgggaggaagtgacgatgctaggaatgaaggagagcaagcttgatctctactgggttagactgacgtgtgtgaggaagagtgaaggttgcgagcgaagagggccgggtcgtgcgtccgctaagagggtcgcgcgacgacggtgagcccggcgcatgcgaccgaaggctagggttacaaggtgtcgaggtacaagatgggcgggcggtcgaagcgatcgagcggaagtcgtcgattgggccgctcagacgtcaacggtccacagccatctatcggtcggtgcgagacggtcgtcagcagccatcgtcacagcgagcacacacaagacagccagacgcaccgcttgctaaagtagcccatgagcgtgtcatcgagaaccgtctcgagccggccctggacatagacggtcttgtccataacctgctggcggagggccgggatcgtctccttgtcgatcggtttttcgagcagctcagatagctgctcgaccgcccgctcgaggtcggcctggttgtcctggaagatgccggtctcgttgtttggcttcaggctgcgaagcaggaagacgcgactagtcagcattgtccggcatcagaggggcaagggacgggacgacgtactagaaggccatcgcgtacgtccacttgagcgtcccgcgagcgaccgtcagcatctcgaccgccttcttggcaaattggacctcgatccacgagaggttcgagacgagctgcatctcctccatcttcttttccgtcttggcatagaactcgcggtcgagcttggccgagagctcgtggttagcccaccggttgtagtactaccggggcgacaggatcgggaagagcggggtcagcgtcagggcgcatgtaggcaggcaggcaggcaggcaggcatcggcgggaacgcacgtggaggtagcgctcaaggctggcacggctcttgctttggccgtcgcgggcctcggagctcgacttctcctcgaaccggttgcagttgtaccaagccgtgccgtgctcggtccaggggcccatgcagacccagcaaaactcccacttgcacttcttgcacgtcatgtggctggcggcgggcgggaggtggggggcaaggtcgtcagcgggcgaacggaaaaggagcaagagaggagagaagaaactcacttgcagccgccgttcttctcaatcgtgctctggcacttggtgcactccttggtgttggcgctgatccagttcgacgtctccgagtcgtcggcgcacttctgccgccagagcttggcaatcttgcagacgaccggccgatgatcggtcgggtcgccgcagccaaagcagaacgtctggccacacgcgcagtcgaccgtcgggatgatagtcgtcagctgcttggccggtgcctgcttgcactcgatggcgaattcgcctgcatgagtggcaaaggggttggaggtcagtgcggatagaggaagcagtcgggacgcgtgcgagaaggacgcacactctgggccagggcaccagcggaggaccgggttgtcgtcgacgtaggtccggttgaggagcgcctggtacttctcgcgcgtcacctcgccgacgaggccgtcgacaatcttctcgccgaccaccttgtcgcagccgttctccatgcacgcgatccggaccgactcgccctcgtcccggatctttgactcgagataggtcgtccagcagtcggtgcacgcccgatggccgcacgagagggccagcgttgacgagtccacctcggccggctcgtagtcgaggcagcagattgggcacgaaaacacctcggccggcgtcggggctgacgacggcggtggggcggtcgcgaccggtggcgagggcgtccgcgacgtcgctgagcgtagtgagcgcgtcgaccgagtcgaccgcgtccggaccggcgaggggtgtgacgaccgctttggcttcgacgacgaggcctctgatgccgggctcgcatgctcgtggccgtgcgagtggctatgcgcggtggcagcgccgggcagggcggcatcgagaccagcctgcgagagacaggcctcgggctcctccatgtacttctccgtgagctgcagaatcgaaacagggggtcagccgggagctggggggggggggaagttgcgggtcgagcgcaccttctcgcggttccagttgaaggagcgcaggagccgggccgccgtctcgatctgaagggacgaggtcatgcaggtcgaaccatcagcaacttgatgccggtcgtcgctgatggcaatcaagaggccaacgcacctccatgtcaaacaggttacgcagcttctcgacctcgctgtcctgcgcctgcttgagctcggccgggttcttgaccttgtaggcgacctcgtacggctgttgcacgcagagtgagagccgactatcagctctcggtaggcgaggaagccaagcggcggggcgcgtgagaccacagactttcttctcgacgaccttcgaggcgaccatctcctcgtagtcgacctcgtcgtcgtccgactcagccatctcgccgtccgacgaaagcacgacgtccgacgcagagtctgcaaacacacgcgcgtaaggagggcagaggaaaggaagcagatggtcagggtcgggtgagcttgtcggagacgatgatgcgccgccagcctcgatgactgatgccgttcggacccgttttgccttccccctccagcgcggccgcctcacgactggagcctcccagtctgcaccccgacaggggtgacctcaagcctagcacagcctacgacctgggcagcggtgtcaaaggagagagcgagcaccgaacgcgcgggctccactcgcggcggcgacgacgcttaagccttgctcgaggccgaccgagccttccccttcatcgacgacctgacaaagcccaaagcaggagcagacggacgtaccgagatccatgacctcgtcgtcctcgtccatctcaaactcgacgtcgcttctgccgggaggagcggccggggatcgtcagtctctgagaagccgcgagcgcgcgctgtggcgacgggcggcgaggtccgccgggccgaagctccagagcgtcgaccaagagtcgctcagtcacctcggcgcgagacgcaaaacggtgggacgtactcgtctgacatgatccgctgctgctacgagaaagtgtgtgaaagagagagcgggagcgggggaagcaggggtcgggtgtcaaggtcgtcgaggcgcggaggttgctcgagtcgggaggctcgtggcgtcggcggcgaggcgtaagactagttacgggcgacgaccgaattacgaggggccgcccgatcgctctagacttcgacgccgaccgccgcgcagcagcaaccttccgagcctcgccagcatcctactttgagcatccaccaacctgtcaaggaccaagcattttgcttgaatgcgcaatgtacagtagagagctgaggtagccccggcatgaggggcacccgtggcaagcaagggagggcaaggggaggcaaactgccggagccgaacaaggctgcaacaaaggggagtctcggccgcagcgagcaacctctgccctctcccgaaaggctctgcctctctccctttgaccatgagccaacatctctccctcgcgccaccttatcttccctcgcagagcagacgctggccgttgctctcgacttctttaagccagcagactctcatcgccaacagctcaacgcttttcctcacctgctctcctccatccggccttcatcctcaaccctactcggccgccgcccgccagctcaagaatgctcgtcaacctttcacttctcgccggtctcctcgctacctctgcatcagtcgccgccgtcaatcaacatgtcatccgctccagtcgtccgcacggcggtcgttcggtccaacctgtctccggtatcgaccgcgacgcagcagcccctgcggctgcagccgccatcgccggcgacgaaggaagcctcgccgtccgccagcttacccgcaacaggtcgaaggctctgacgagctcggcctcatccgcccgcccggccccgatctcgacgtcccagtcggccagcccctcggcctcgtcgccggccaccgtcgcacgaggcatgaggactttgggcacggcagcctcctcgatgtcgacgacgtcgtcctctgccgctgtagtcccttcgtcggctcctgtctctaacggccagaagcttgttgctgtccaccacatggtcggtcctcatctgtgctttgaagcacgacttcttgtctttgttttgctgacgaacccccgcggtcatccaggtcggcaacacgtactcgtatagccagggcatgtgggcagccgacatcgctttggccgccagctcaggcttcgacgcctttgcgcttaaccttgggaccgactcgtggcaagccgctcaggttgcgtcggcctacgcggccgcccaggcgttcggcccgagcttcaagctcttcctctctctcgacatgaccgttttcccttgcggttcggccggcgacgccgccgcgctcgtcaatctcgctgccacctacgccaaccacccgaaccaggcgatgttccagagcaccggccggccgattgtctccacgtttgccggcgaggcctgcacctttgtccgtccttttcctctttcagacttggctagccgctgaccccctcctgtcttgcactggggaaatcttcagggcacatccaactggatagatggctggcagaacaacgtcaagtcgcccttcctgacgcggaccggaaagaacttctttttcatacccgcggtcttttccgacccggcaagcttcggcagcgctaccgtcatggacggcgtactcaactggaactctggctggccgatgggcaataccgacgcagtttggcagtcggatgatcggtatctgggtgctcttggcaccaaggcctacatggcggccgtctcgccgaccttcttcactcactatgggccaaactcgtacaataagaactggctgtttaaaagcgacaacttcctctatgcccgccgttggcaggcgctcgtcgacaaccgcaaccgcatcgactcgatcgaagctctcacctggaacggtgcgtcggcgcgagggcacgcttcctttcccgctggctctgaccctcctcccaacccctgcagactacggcgagtcgtcttacgtcggccccatccagggcgaccaaccaaactcgcaggcttgggtcgacggcttcgaccacaccgccctgctggcaatcaacaaatactactcgaccgccttcaagacgggcagctacccgcccatcacggaaaacgtcatctacctctcggcccggccgcacagcaggacggcgaccgcctcggccgacccgattggccggcccaccggcggccagaacggcgaccccaacggctacctctggacgccagacgagttttacgccctcgtttttgcgactcaggccggcgaggtgactctcacgagcggctccaacatcaagaaggtcgccgtctcggccggcgtcaacttcctctcgcagacgctccaggtcggagctggcatgtcggcgtccttcaatggtgtctcgtgctcgccgcgttttacctgtgagtgtgcgcagccgccggacgaaaagactgaacacgctgacgcagatgccgcccactctcgcagtctctggcaacccgatgacgtacaagtcactcttggcccctttcacctgcttgctgccttgcgcattcggctgaccctgccttttcccgcctcccttgtcgcagctggaactacttttacgcttcgagctcgtaacttgcgctgtgtcctggtcgccccgtctctctttcccttctctctttccctttcgcccccctcttggtcgattcccgatcccagctagtctgtagcacccatctctcggtggcaagtcgttgtgcattcgcatctattggtcgtttcgttaattacgtatgagcctactcacgggcaagtgtgaggagcgacgcccattatgagaggaacgtcgcgaaggaggggctcaaaggcctgcctgtcgacgcttttcgagaggttggcaagttgtgcctgggggggtcattatccccccgtcagtagcagcagcaagctcctctacggcacaccgtttgtggtggtggcctggggtggaccccgacgtccaacgtcgcagatccctttgtcgaatcgaggccgctggctagaggcagcggcggaaggacggcggcgtgcatcgctagcaccgcccatccagggcaaggctcgcgccttaaaggccgaacgactcgcggatcgcgtgtccgagccggcgggcgccctcggccatctccttgggggtcgtgtaggagaacgagcagcggaggaagatgtcgttgacagtcgtcggcaccgaagggtcggcccggaagaggtcggacggggccgtcgtgacgccgttggcgataccggtctcaaagacgtcgagcaggacgccgtcggggccgagctcggcaatgcgcgggtgggcggcgaccttcaggttgatgaagtagaacatgccggccttaggcgtcacccatgagacgacctcgagcgggaggtgctcgcggaagagggcctccatccgccgggcccggtccgagtagctgagcgagcagtgctcgaggtacttttcccagccctcctggccgccgatggcgccaatgaaggatgtgatggcggcgagcgagaagccgctgatcgactgggtcgtcacctcgctgcggtaggcgaagcgctcgagcagctgcgacgggccggtgatccagccacagcggcagccgggagcgacaatcttcgagaaggacgagaggtcgacaacacgggcgtccgagtcaatctcgaggaagctcggcgcggcaggagccggcttgccgtcgtccgagaagttgagaacgagcgcgcggtaagggtcgtccgagatgatgatgaggtcgtgcttgcgggcgaggctgtagatgaccttgcgccggccaatcgacatggtcgtgccagaggggttctggcccgtcgggacgaggatgacaaccttgggcttggggccctgggcggccgtcgaccagttgctgaggacctcgtccatgtgctcggggttgagctacgaggcagaagggtggataggtcagtcaagggcaaagccaaaggttgcgctgaaggcgagactcacgccgtcgtggtcgagcttgatggcgaccggtttgaggccctgggggaccatggcgttgagagtgcctgtggacgagaaaaaatggttcagcttggagctgagctgcgaacatgcgatcacagcaaaagacataccggggtatgcaaactcctcgacgaggaccgactcgccccgggcgcagagcgtgcggaggatgttgtccatggcgtcagtctaagagaacagacaggagcaggtcagcaacagctccaaccaaggcagaagtgacaagggacgaacgtttccgtgcgtgacgaggacctcccagtcaccatcttcatagggcaaagagaagggcgagcggtcagagaggcgacagatacgagccggacacagggttcagacgcacaagggatgtggaaggagcgctcgacgtgctcgcggataaaggccgacagcttggggttgcctgtcgagccagagtactgcatggcgagcgcgagcgggacgtaggtcgcctcgttggcggagccggcgacgacctcgagctggtcgtcggccggctggtcgggggagctcatgacaaccgtcttcttgagccaagggaaggtgaaggcgacctgcgaaacggggaaggtcgacggatggggtagtccaccgccgaacgagatctggccctcctggccgaggtacctgggaggtggcgggtgaatcagcggcgacccatgtgcgcggcggcggaagccggtgggcgacgcagacgtacttgactgccaggcgcttgagggggctagggccgcgagacttgctctcctccgagaggaagcggtcgtaggaccggatcggctgaccggtgtgctcgtgaggagggacctgaaggagagagacgggacgaagagggcggcgcagtgagcacgaggctatcggagggagagaagccggaagggagtctgtgaacgaacgtcctgctgagcctggaagaggtcggcctgggacgtaggaaggaggacggtcatgctatgcggcgattgatctgattgagggtgtgggaggaagtgctggctggtggttggaagggaggggagggaagagcgaccgcagagggctgaactcttgaaatcctcgtccggccgcgcagctgcgccccctgccggccgaccgacggcgtcagcaggggcaaaagagtcagggcgcggggcgatcgatttgcccctgcgctggcgtcagcagggcacgattctggctccgagctctgccactcccgcaacgtaacggcagcttagaagagcaaatgacattctgtcgcccggacagcccgacccagcgccctccttcagcaccggttcttggccggcacgggaggcggcgttgcccaagaatcgatgccgaccgctcgttcctcgcgggtctgcgaagaggtgggccgccaacagtcgttcagaagtcagcatggcgcgtgcgcacaggcacgctcgttgcggctggagctctgccagcgcagtcgccagtaacgcacaacgtcaaatgccagggtgaggaagtagactggacgagggttcggaccgtattagcgcaggcagtcagcgcgagatcgacgtcgagaggtgcgagctggtcggaaagacgcaccgaggctcttgaagacggctgtctgggtgaagtgcagtggcttcctgcgaagggtcggcagagaggtgacacggcgagtcagccaggtctccggacagctcacgaggggccgaaggaaagccgacgcgtcgcgcgcgatgccaaactagtcgaagggacgcaacctgaccagcagaacgccctctgagccccgaggcccggcctggccaaagtcagctgtcgtctggccgccagtctcgacgccgacgacgcggccgcgaccgaccgagctgatgccgagcgggtcgtcgacgctaccgcgcagggcgggcgccatctcgatctcgccaaagacgaagtcgcgtgtgtcggtcacgagaaagtgggcgagcctgttctccttgcaggtcgcaaatatctatccagcggggaggagaagtaaccctcgggtcagacgcgttcagagctgacagtagacgctctgaactcacgtgcgcctggaggaggttggcgtggatcttggccggcgccggtcgcatctctcgacggcggtcgcggaaggggatgccaagctcccagtcgtcgtcctcgcgcgagaaggccttcaagaggcccgactcgggctcgacgacctcgacgatgcaaacccggtcggccatgttgcgaccgttgacgaggacgagcgtctgcgacttggttgctgggtagggcgaggtcgggtagacgccgtcgccgactcggtcggccgccaggcgcgtcgtgaccttgcctgcgtagcgagggggggggggggagatctccttggtcagcaggcggacgaacggatagtcaaacgtcgacaacgcacggaactcaaagtcggcgtgcgtcggacgcgttgcatcaaggatcgagagggcggtcaggaggacggcctcgttaagccagaagctcgtgccggcgacggtcggcggcaggccaacgagcggcgggacggtggccgagaagcccggggcgatcatacgaaagaaagggccgtcgtcgacgagaagcgagactggagcggctgggatggccgagatgcctggtgagtcgtcgcagggggtcacatgtcagcgatgatcctgaccgcgggattggaaggacgacgtacagcgctcgacgtccttcgcccactccttgtccgggatacattcgacccgctcgaggcgcggaagtgcgagccgagcctggtgcaggacctcgtacgagcgctcgaggagctcgcgcgtgctcttctgcggcgagagcggcgcctgcgggcagaggccgatggtcgcgcgccgagtgtagagctggagattgtcctcggggtgcaaaacaggcgcggcctttgtggtcgtcgtcgaccgagacgttgcgctgcggagagagccgaaaggcgaccgggtcgacgaccaaaacgtcgagagcgagccgagtgacgacagcgaggacgacgaggccgccgacgagaccgaccacgaaggccgccgattgtaccaccgacggggcgccggcgacgacggcggaggcttcggaagcagcgtctcgtaggccgactcgcgctggttgctggttgtcgccggcggccgctcgagattgactgaaggagcagcccctgtctgacgccggcggccttcctcctcgctgagccaccgtcgctggctcggtccttcgtcgacggggaacgcccgcgactcgcgcgaggcgaagccgatggcagggtcgcgccgaccgacctgggcggcccagggcgggctggagaggccgagtccggccggcgaggggcggtcgttggcgctcgagtgcaatgtaaagggccggcgcgtcggcggcgaggaaggcgagctgtaaagcatggctggtctggatgggcgagtgggctgaggagcgagcgagagagagcggcctcttgaggtctccaagcgaggcgagaggcgacatggccggccagcccggaatgctgtcgagggtggaaggagagaggggtcgagctgctgcgcgcgaagggaggtgctccggccggccgtgcgcgcggccgtcttgcaccgccgccctaatgacccgctcgctcccgttgtcggtcgcgcaagtctgccaaaagaggcatgagcataaggagagccgttttaaggtttgcgagagatcagcagcgaaggtgggggggggagaggaggagatgcaggaagcgagcgacaggtggtacaacaggcgacgatggtccgagagaatggcgacagcgaggcggacgactggtccaggacgtccgaccgagcggtacgggccggcctgctcgcacagccgcaagggaaaagaacaacgtgttctaaagcttgaggaagcggtacgtcgcaaaggcgccaacgatggcgaaggcgatgagacagccgacgatgctgaagaactattcgaggagacgcacgagagaaaagggcgtcagtcagaatggaggcgagcgaggaggccgatgagcgaccgggcgtacccaggtcaggttgccctccttgtcctggccgggcacccagacgttcatgccccatagaccggtgacgaggttcatcggactgaaggcagagggacacgccgagatcagctgcgatcgagagcgaacaacagcgcgagaggccatgacgcacatgaggacagtaccgagcgcagtcatccgcgataggacctcgttcatctggttgttggcgtcggtcatgtcgatcgagatttgagcaaggtagttggaatgtgagcgcgagagaatcttctcgtagtggttcaggttctgcgtcattgtgatcagatggtcctggatgtcggacaggtagaggccctggcgtgcacaagtgaaggctgtcgtcagcaaggatgggggcaggcaaccacggccgcggcagagcgcacaatgtccgacttgggcgcgacgctccagctctcattgcatcgcttggccagacccttgacgacgtcggccttgttgcccatcaggcggagcaggcccatgacctttttgcggcacgtgccgatccgccggagcatgtcgctctgctcggcctccttgagaatcaggacaagctcgtctgagcgatccgagcaggtgccgctggtcagttaacgaacgataagcgacctgtcgctaagaaaggaggaacgtaccgattgagtcgacctcgtactcgatcgactggacaagcggaccaaaggcgtcggcaatgtcgtcgatgagcgcgtacgagatccagtccgaggtcacactgatgtagtccttgagctgcttgatgcgccggcggacgttctgcgggtggggcgtgccgcggaagtgaaactgtcgaaggaagcggatctacgtcagccagcgaccgaaggcagagtagacggaagatacggtggccgcaccgagagcgtcccctcgcggaagacgatgatgtacatgttgagcggctcgaggtgggtcgggctgtacgggtcctggtcgaacgaccggaagcagacgaggtagtagttgcggaagagctcgatcttctcgcgggcctcctccatctggatgtcctcggtcgtgagcgggtggatgccaaagacctagcgagaagtagcgacagagcgatcgtcagcagagggaaggagcgacaagcaggagaaagcaggacgcaccttcgacagcgtcttcatctcgtcgtcggttgggcagaggacgtcgagccaccaggtcgtcgactctgggtcggcccgctcgcgctcgaccgcgctggcgatgccgttcgcgcccgggccgccaggcatcttcgacatgcccatcgccttgctcaggagtgactccttgccgccgttgccgccggcgaccgacgagccgtcaaagctccgcggcgttgcggtcccgcttgtccgggccgtcgcagcgtgctggggcgagccgtcgtccttcgttaggctctcgtcgtcgtcagccgaccggcccgagaagaggtcctcgaacgtctggccctcggccggaagctcggagagcgagcgagcgtggatcgtcgagggcagcgcgttcgaataaaaggaaaagcggtacggccggtcctggaggttcggctggatcagcggcggctggaggccggttggcgggggcggtcccgaaaacgtgtcgtagagcgagctcttggagtcgcggacggccgcgggcatcagcggcgccgccgacgggcttgccgtcgtcgtgaaggggaacgacgagggcgcggtcgcattgccgcctccctcgaataaggccaccttggcctgtcgacgggcgtgcggggccgggtttgactgcgagagcttgcgctgccggcggcggacaaagttagtccgttggccgctgccgtctggagcgccgggcccggtcgagccgtcgcgcgactggcttgcgcccgccgccgagcgttgctccgtctcgtcgtcggccggtccgtcgtcaaagttgccggtgtcactccggtgaatgtcaatcgaggcccggtcgtcgacgagcttagccgactcgtgtgcgaccggctcctcggtccaggtcgaggcaacgtctgggtgctcgtagcggggcgtcatgtcggccgcgccgagcgtgatcttctcgacctgggcgaagtcctccagcaggtcgaagtggaagcggttgcgcgtcgcaaagccgccgaggtccatcctccgaacgctgcccgcccgagacgactcgccgccgtggccaccatggccgccgccgccgccaccgagcatcatgccgggtgaggcacggatcggaccgcccatgggcggctcgtcctcgtacgagcgcgagggctcatttgagtggtgccggtggtgatgctccctgggcgagctgtgcccgaactctgggctgtggcgcccaccaccgccgagcgtgaaggacgcctcatcctcgttgtcctcgtggatgacctcctcgtcggtcccgtagccggcagccgccccccggcctcctcctccccgagcgagcgacatgtgagcctcctcactctcgctcagcatcggaaactgcggcgtcgctgagccctggtcatgtgacgagttgtgcgatagccggggcggggccgacggtcgacgcaggacgtcgggcgacatgtgcgacgcgccgatcggatctctcggcgaaagcggcggcgagaagccggccgtgatggaggccgaccgggcgcgggctgcgagagcgagtgggccggaaggcgtcagcctaacaagatgcaagagggtctgcaagaccacgacgctctccgtccagatctagcctcagagcaggccaagtcgcagggaagagaggaagaaggacttactgaagccgatggcagagtcaatgtcctgctgcttctgccgctcgcgctgacttggctcgtttgggttgaagctcctgcctcctccgaggatgctcgggtgcgggccgaggccggtgtgggcagccggcgacgtcgacggcatggtgatggcatgcgagccggagggcgagtgcgcggccgaagacgaggccgaagtcgacgagtggcggtcagcggccgaggaaggcatgagagtccgcggagacgaaattggctggctgggcatcgtgccgagggtgaaggagggagcggcggcgaggacctgcgagggcggaggagggcgacgaaggggcggatctgtcgaggagaggaagacgaggcggagatgtgggttactggtctcttcttttgctggccggggtagttgttgccaagtttcgctctatcgtcgtctccttgatccgattcgtggtccaagctctagggaggaacggatgagaatcagagaggacgaggaagaggacaagctccttctcagggccaagaagccgccgctgacgcccttcgccccgggatccgacttgcagatgccgtttcagccgaaactgatggacgacccgtcccgaggccctgccgagatggctcgacgtaggatgatccagggtcgacgacaagactgtcgtactgtcgctttgaggcttaaagcgagaccgtgtctgtctgcggtcgttgcaaggtctgacggagctagcttgccttcatcaccgcccgctgctgccgtcttggactcttggtcgatgcgcagcggcgctgacgttgcttgcggtcggagagagcagcagcagcagcgaggtgcccctcagaccgctcagtcgtctcttgctggcccgaatacgatgcgagacgacgctgctgtcctttcggccgagcgaccgaacgctacaagcttgcgtgtggtcgacggcatctgtccagccgacgaccgcctctgcctcctccggcctgaccgggctgaggccgccaacgctcaaagggccaatcgccgacgacgtttccgcgctcgaccatcagcctcctcccacactctcaaccttcccactcagccatgtcgctccgttcaaacgcagctctcctcgcacgctgtgcgcgtgcccgcccggccgtcgccgctccgcgcccgtcgtcgtcgaccgcccgcttcgctggccgtcggtcgtacacgaccgccggcggcgagaccaaggtcccgccggcaagcgcccctcccccggccggctcgtcgtcgagcacgccgtgcgtccagctgatttccttctgctacagcgaaggatgcttgctgactaagcgctgctccccgctgtctcgtctgccaggctttacctcggcggtcttgcccttgccctcggtggtgccgctttctacttcttcgggatgggtcagtcgcccgagggtcagggcaagaacgttgcgaccgccgtcaagggcgccaaggcgtctgtcgaggccgcgaccggtatgaagcgcgacaaggaggactaccagaaggtgtgagttctacgttccacccaagaggaccccgggcggatggccagctggcagaggagatgggccggccggcaaagcgctaaaccttcggcgctgaccgatccccctcctccgtacttgcccgctctcagctacaacgccatcgccgagtcgctcgagaaggaggactatgatgatggctcgatgggccccgtcctgctccgtctcgcctggtgcattcccttcctcttgatttcgcttatcgcgctgccttctgtggtgccgcgccaaccctgtgaacagccgttctgatttcctcgtcgcatcctcaggcactgctcgggtacctacgacaaggattcgaacgtgagtctcttctctttccgcgatcgctgtgcaacacccagctgacgtcgcctctccttgcagaccggcggctccgacaaggcgacgatgcgcttcaagcctgaggctgagcacggcgccaacaacggtctcaacattgcccgtgaccacatgcaaaagatcaaggagcagttcccctggatctcgtatggcgacctctggacgctcggcggcatcgctgccgttcaggagctcggcggcccgcaggtcaagtggcgcccgggacgcattgttcgtcgcccccttttttcgtcggccgatcgcggctttgcatactgactgcagcggctcgtcggacccctcaggacggctacgactaccacgcgacgcccgacggccgcctgcccgacgcgactcagcagcatgaccacctccgccagatcttttaccgcatgggcttcaacgaccaggagatcgtcgccctttctggcgcgtgagtccccgagcggtgctcttcttttctcggctcgaggtccgcttgctgactggcttgtcacactctaccctgcctcgttccagtcacgctctcggacgctgccacactgaccgctctggctttgacggaccttgggacttctcgccgaccaccatggttcgtctgccttccatcggggccttctgtcctgcccggatactgaccttgccaccccctctattcttgcagtcgaacgagtacttccgcctcctcgtcgaggagtcgtgggtctggcgcgactgggagggtcccaagcagtacaccgacaagtcgaccaagacgctcatgatgcttccgaccgacatggccctcgtcaaggacaagtcgttccgcaagacggccgaggtctacgccaaggacgagcaggcctttttcaaggagtgcgtcgctctctctcgctccaagaggggctcccgctgactcttccgacccattttgcagcttcgccgccgtcatcgtcaagctgttcgagctcggtgtcccgacgagccagttccccgtcaaggagggctggtcgatgcagacgctcgagtctcaggccgacgccaagaagtagatcggctttcgcttcttttctgcttctctctttacctccctctgccgggatcgctgtctcctcccagatcctcttgatgttgtgacgacccgatcgcgagcatggctcggctggacagcgtcccgtgacagcgatgaccgaaggaaaggtgaagtcatggccatcccgcgggcatctcaggccgtctcttagacgtcctgcatcgggtcgtctggcctgctggcgggctcggcggccgggtcggtcggcagagcaggcggacccgacttgcgcgcccgtgtcgggagtgagttgggcgttgacggcaggcgctcctgcttcttgaacgtgctaaagctggagaattaggtgtgtgcggcgatcgtcagcccgaagctcactgagcaagcgcaagaggtagaggaggcgacctactctttagggggccttggcgagctcgccttgcggatccgcggcgccggctttgaaggagccggcccagcgcccgtctcgctgtcggacgcgtccgtcatcgccgctccaccgacgccgcctgcgaccccaccgctgccgacctttgcccggcgggcgttgacgatggccgcgttcgggaggaagaacggctgctggccgggccgctcgagcgccgtgtaggccttctcagtcgccccgcgcggcttgggcgcctggaccgtcggccggtcctcgccgtcgtcgagcgtggccgccagcggaggtgcggccagggcagcctccttctcggcgcggagcgcgagcgcgcgctcgagcgggattggagcagggatcatgtctgaggcggttacggcagcagggaggtcaggttagcctgcaaacagcgtcaggcggcgtttagcggtaacgcaccctcgagaaacatcagctcatggttcgtccggacggcgttcgctgcgagagaggtgagaggagccgcggcaagtcaggaccagagccaaacgagtcccgtcgtcagcaatgcggacgcacacatgtccttcagctggaccgtcttgcgctggtcggtccgcgccttcaggtaggccgcatcaacaaatttctttaggaagaactcctggaggagtggcgcggtcggtgccatcgtcagcctgcttgcccgagcttctcggaggcgtcgctggccggccggcctcgacaagagttgccttcaatccccggtcgaccgtgcaccgcgagcgagactcaccgtcgcgatgccgatcaagaaggtcgcctcctttgagcacatgtagatctcgctatcggccttaatgatcttggcgacccggctcatcgggagcgtgctgacgccgaggtcgtcctcgccggcctggggcttgggcggcgccgggcgagccttcttggcaaccttgggcttcggggggtccatgctggcttcaaaaggtgcggataggatgcttgcgacgaattgccgtggctttgtgctggggctgaggagaaggaagagaggcagcaggaagggagagggaggagcaggtcggagaggaggacgacgccgccaggttcgcctcgacgcgtctcttgcctcgcgccgccgcagcaggagcacgctcgttgcgcgatctcgtctggagcacctcatcaagcagcatgactaagagcagaaagaacactgaggacttgtgtcaagattgctcgtgcatttccgtaaggcgaggcaacgagttggccacgtctggaggctcccagaacgggcttagtgctagctccgccagctgcgggcgaacgaacgcaagtatggcacgtcggccttcctcacctaacagcggattgactgactgattgctctacaggagattctagccaaggcgccctcctcacttccccgccagctgagcagccgtgattgtcaccagggagacgaggcacaaggccgagcagagatagggccgctgcgccgccgtcgcgagcgaccgtgttcgtcgtctgcccggccggcggggacgagctcgcctctcgttacgcccacaccttctcaccttctgcactcgacctcgtgcttcgccctgcaggccaggaagcgatggccagctccatctggtaatcggtcagtctgacgctcgaggtccgcgacttttcagacaggcggagggagctgacggccgctcgtcccatcagcagccactctcgacccctcccccttccagccttcgtcccctcctccctccgcatcgcacaagctcgatggccttctcgcccgcgcggcctttcgcgtcgcccctgcagcgctacccgctccagtcgtcggtcccgctaggcgccggaagctctcccctcggctcgccctcgacctcgtacgcccctgcaccggccgacgctggcctcggcgccgacgccccgcgactggctcagctcgggcccgacgacgaggtcgccttcagtctcttccctctcggcccggccgacgtccgctggaggtgctttcaggccgtgtcgggcgccaaagacgatgtcgcctgtgcgctccatggtctccgcaacgccgtcacaagcagctggctcgcggccggtgcggccgacgacgacgagctcgaggaaggccaggagtcatcaccgccggccaagcaccacttgctcaactcttccgtcctcgccgccgtcgtcccattttcgtccaaggcctttgccagaaccgttcaggccgcccaacctcagccgccgcagccgagcccggagagtatgggtggtccgggcgcatcggccccgccggccgaggtgctcaccggcaaggaggagggcggcgaggtctgggtctttgacatccagaccgcccaggcccactcggcatctgctgcactgttcgactcgctccatgagcgtcttcccgacggtatcaaaggtcagactagctcgttgtcgggagatggtcgggcgacacagttaactgacgcaggccatcctccaccttcatgcagaagtctccaagggctcgttccaggtcggcgacctctttcccagtttagactcgaccgctggtactcggtcgacttcgctcgcctctcttctcccgacggcccacctccgcaagatctacccgctttttgtccaggcggcgcgggaacggatgcttgcgcagctcactatcacaagcgcgaaaggccccgaccgagggcgcgccttccgctgcggcgactcggttgttctctacacgggtgctcgcgaggaggagggcgatgccggcaagacaggccgtgaatggggcgagacatggatgacgggcgtcgcggccgaaccgcatcggtgcgcaatggcctccccacgactttcagtggtcgcgccggctgacctcgatactgccctgctctcccccagcaccgtcctccggttgaccttcgccctcgatcttctgccggcgccgcacaacgccttccttttcgtgccgcacgtccagcgaatccccttcttcccgctcgcttatcatccgcagctgcgtcagtttggcgcaagtccaccaacgaagccgatcgcgatccggctactgccgctcgacacgccggccttctacctccgcaagagcgcaacggcgccgatcgaggccgacgcggttcagttttggcaggcgatgggccaagccggcgcacgtcgtccgccggcaggcgaggacgactgggccgtctgctgggtccccgcgccggacgacgttggcatgaagagcggcaaccttgtcacctgggagacgactctcatcctgatcgagagctcgacggcagagctctcggcagagacgtcgccccgagcggccgtttccaagctcggaccaccacccgctgcccacgctggccggagtccccccccgcccgcatctctgcagccattggcctcgcgcgcagccacgctggccaacggctggcggaagctcacctcaaagtcggtccgacactttgcgccgacgctgccgtcgccgacagactcgaccgagtcattctcgccgtcgagggagatcgtctttgacgagtacgaggacctcgccaactcgacgagttcctacctcgacggcgttatcaaggcccgcgagctggagcgtgaacggctcgaagccgagaaagagcgcgagcgccggcgcaaggagggcggggcgcagacgccgccgccgacggagccgaccggctcgcccgagggctcagacgatctctggggctcacctccggctgccgaacccgaagaggtccgtcgaccgagcgcaacaacactccacctgccagccgcctcgtttcctgtcaagccgaacgtatcggaggagctcgaggcgatggaggtggaccatccagcgcaacctcgcccgcccacctgcgaaccccgctcgctcgccagagttcatccacctgatttcgtccgaggcaaacgaggcgtgcgaggcgacgtcgaaaaagaccatctcgcccgagcacgtcgtcagcgcgctcaagagcctcggctttgaggcttacgtggaggagtgcgagggcgtgctcgacgagcacaaggaacaccagaaggtgcgcggcgactttcagaggcttgcccagacgagtcgtctttactgatagtgccacccgatgctatctcctgcgatcgtgtgtctgcctccaggtccgccagacaaagtcgcagtcagcgagcaagaagaactctggcatgaccgaggaggagctccttgcccagcaggagctgctctttgccgccagcaaggcccgcttcgaggccggcggcggcggtgtccctccggccgagggtccagcctgagagggcaatcgggctttggtcgaggggaggatgagaggttgcttgagggcgacgacgagagagggacgggtgcgcatggcggcgcctgcaaaggctttgtcggcctgctgcttagcctgagggcaggaggtcctcccactttgcttcagtgactgttgtaccatcgactcatggtccaattcatgcaacggcggaccaggaggagtggcgaacagtgattagctcagctgtgcgtccgtgccgacgacgcctcgccgcaaaggcccgatggctctggaaaaagtcggccgtcggggcgtaactcgtcgtctcgctctccgctccgaagcccagcaaccaacacctaccgcctccgtcctcgcctgcttcccggacggctctctcttttccttccttcgagtgactttcctccttggagccgcttgccccgcccgccaccatggccgccgattccgccgcatcgaatgagctcgaccaggctgccgccgccggtgcgtcgtgtgcatcgcccgggccgggctgcgtctagcagctccagagctcgccccgtccgaagctgagctcgctcttgagctcgggccccgagcgaagccttgcttttgttgcggacaggcgagctgacgttcgcccgaccttctcctggaccgacctcttgccacagccgagccgaccgtcgaggcccagggcgacgccgccgaggagatcgaggagggtgctgaatgttagtccttgctcctctccacagattgctcgcctcgatcgagcgcaggttgcggcagaacgtccgtgctgacctttttttccgtcctgccagacaccttcccggtcaagattctgctgcccgagccaacgtactcgaccgcgtacccgcccctctttgacgaggccggcaagaaggtcgccccgccgacgtcgtacacctttcagacggcgacgcccgagatcctccaggtgcgtgcctctcacatcctcctgactgccgtcgatcctcgggcgcttctgctggcggcagggtggaagcgctcggtgctgcgcgagcccgtttgccgcggctctgcatgaagactgacggtctgaaaactccctctttgtcgcctcgcaggacctccgtttccagatccaggactcgccatcgggctacttcctcggccccttttccttccgcctgccggtcggcgagggccgtaagaagggcgagctcgtcaacacgggccgcgagaatctcgaggtccggctcggcgagaagctgagcgactttgtcgagctcggcgaggtctttggcagttttgagaagggcgtcgagcgcgtgctcgaggtcgtccgtggtgcgtctgggctcctttcgccgcgagacaacacgcgccaacagctgactcgacgtcgcttcctgtctggtcgcagagcccttctcggaggctgaggcccgcgcccagatcatccgcctgcgcgactacctgagccagggctcggatgcgcaggacccggcggcgctcggcctcaacccgggagcgagcctgtacgagatggtccgcgacggcctcgtcaccgtcgaggagaaggaggccgaggagcggcccgccgccaacggctcggccaaggccaacggcaagtcgaagaaggcttcgcctgcgccggtgtcggcgagcaaggcccggacgaccgtcaagctggtcaagggcacggtcgcccccttctccgagacggacagctgggcggcctccccgctgagccagttccacgcccggccaattgagacgcccaacccgccggccgcgctcaagacgctcaccgtctcgacgtggaacccgccgccgccgcagtatcggtccaagggccaccttgtctacctcgcgctgacgacgctcgagggcgagagcgttcagctgacgggcaccgtccggggctggttcgtttccaagtcgacgaccgtctcgttcgatccaacgccgcggccggcgcccaagaacgtcgaggcccactcgctcatcgacctcctccatggcctttcgcccgccttcacgagcgccttccaccagctgctcgccggcgcgaccggcgcctcgagcgtccatccgccgcgcgagattctcgcgacggcgccgatccagcaggcccagccggcccacccgtggctcgtcaagcctcaagcggcgcacgtcgccgacgctctccgccagcagctcgcctacctccacacgggcgccgtcggcgtcgaaggccttgaggccgctcgcgactggaacgacgagctccagcagggccgcgagctcggcaaggagaccatgcaagacaaggtcaaccgcgagaagcacctcgcccgcgtccacgccgaattcaccaacgcctgcgtccgcggcgtcgtctcggtcgcccggggcgacgtcatcccgctcaacccgcacgagaaggccgacgcccacatgttcttctaccacaacatcctcttcaccaagggctgcgactcgatcgagtcgttctcgcacctcggtggagacgctgctgcccacgctgcctcgggcaaggacgccgccggcatccgtgcgctcaaccagcttgacgtcgatggcgtctgctgcctcggccacactgtcgtcgactgggccggtgagcgctgggtctgccagacgtacctccccggcatcttctcgaagcggctcggagaggacgagaaggccgccgccgctgccaccgccgccccccctaccgagcatggcgccgagattgttgagggcgccgaggtcaagaaggacacgtcgaacccgctcattgtctatggtctcgactttgaggccggaccgacctcgatcaagtgggacgcctcgtttcaccaatcgatggagaagattgccgagggcttccggctcgccaagcacgaggtcccgaccggccctgccgccgaggacaaggtcgagctctggtcgtcgttcgacgtcaagggcctgcttggcaccgatggccgcaagtacgttctcgacgccttccggctgagcccagtcgacgtcgagttcctccagaaggacgctgccggtaccgcctttaccgccgccaacgtcgccgaccggaccggtgcgctcaaggctgccgagggcgacgacgaggctgctgccgctgccaaggccgtcccggccgacgagcaggagatcgccgcctaccctcaccggctcgtcctcctccgtcaggagcttctcgatggcttctgggaggccgagttccgcaagtgggcgaccgaccgcgcatccaagcgcgagaagaaggccaagccggctgccgttgagacggccgagcgcaagaaggccgccgcttcctctgacgagcctgccgccgagggcgagaccaaggaggaggctacccctgccgccgccgaggctcccaagcccgaggaggaggagcgtgtcgtcgttcagctcaacggcgacatccacgtccaccagcccaacggcgaggttgaggtcgtcaaggccgagcctggctcgcgcttcgacctccgcttcaacccggacgcctgggttgaccttaaggccggcgccgacgccggcaaggacacgatcgcctcaaccatcaccgacgaggccgacaagtcggtccaggccgtccgcaacgcgtccatcttcctccggagcaccgtcatcccgacctttgtcctcgacgttcttacgaatcgcgatagcagcatggacggtgtctcgctcacccgctcgctccaccgccggggcatcaacatgcggtccgtcccgcaacctgctttactgagccgtctgctccctgctgaccagcggcgcctttttcgttggcttttagctacctcggcgctgtcaccgccaccgtcgagaagatcgccgccgaccgcaaggagggcgaggcgatcggcaacctcgaggcgctcaaggtcgtcctcaagcaggagatggtgttccgttcgtgcaagcgcattctgcgctcgctcatcaagggtctccttgtcgacgagtgggctgctgccctctcgcacttcctcaactgccttgtcggcaccgccatcgaggccaaccctaagccggtcactgaggcgctcgccttctcgtccgccgagcccgccgcctggaccaagctcacgccgacctcactccaggccgatgtgattgccgaggttcaggcccgtttccgttacacgatgtcggcctcatactttggcgaggagctcaagcggccccagattgtccgcgagctcgccagccgttttgcgttccagctcgcgagccgcgactaccagttcgaggctgctgccgtcgccgagggcgagtcgacgtccgaggaggccgtcgccgccgccaagaagcgcaaggccagcaagaaggccggcatcgctcagcggacgacaaccttcgttcccgaggacgtcgttggcttcgtgcccgccgtcaaggacgccgagccgcaggttcgttcagcgcggtcaggatgagagaggttcgatttgcttactacccgaccttgccctgcagagctcggcttcggaggagacgctcgaggctggcaaggtcacgatcaaccgcggcgaccgccagggcggcctcgagctcatgcatgagggcgtcctcctctacgagaccatccactcgatcttccacaaggacgtcgcgcgcgcgtacaactcgtacgcgatcgccgtccaccaggtctaccgccaggcgctccagcagcagctcacggccgaccccaagacggagcagccgcctgcgttcggtgccgagcttgccgaggccattcggctccagcgccaggccgtcatcattgccgagcgcacgctcggcctcgaccaccacgagacgatctcgttctaccagaaccttgcgatgctcgagagcctgtcggaggacgtcgagacctcgctcaggatcttccgccacgtcctcgcgctcggcaacatcgtctacggcgagggccacccggagcagctgatcctgctgaccaacgtcggtcagtatctcgtccgcactaagactctccaagctcttcgacttttgctgacggttgtctctcttacgctcaggcaatttgctctcgatggcgtcgcagttccaggcctcggtcaagctctttgagaagcatatcgagctcgctagccaggtctttggcccgtcgtcgatccaggtcgcgtcgacgcacaacctgctctgccagacgctcttctgcgtccaggacctcgagggcgcgaccgagaacgccgaggcggcgtacaagatctacctcgagcgcctcggcaagagcgacccgtcgaccgaggaggccaagcagctgcttgacgccttcaagacgcacgccgcccagacggcgctggctgaggcccagaacgcccgccgcgtcgctagcctccccgccgccgccgctgctgccgcctcgtcgagctctcggcgtatgctccagcagcaggcccctgctgcgagcgcgacggcgccgagcgcccggcgcaatcagcggctgacgagccaggagatggcccagcgggcccagacgacggccaccgcgcctgccgctggcgccggccagtcggccatcggcagccgcggccacctcgagcttgacgaccttgtcaagttcgtcggcggccaggcggacaagaagaacaagaagcgggccgcgaaggagtagatgcgtcgtcattcttcggcttgttcccctttctttctcgtgcggcagcccgctcgctcttcggatcctggactccattcgcccccagcactgttctctctcgacccgtccaccacccgcacctgtataccactcgcacacgcccctccgcatctccctcctccttgatcaaaaaggcctgcgccgctgctgccgggtccctcccttccctcctcctcccctctgcttctctcgcacgacccttttacaaccacccctgctcatcatctctcatggaaatcccagtctcctcaaccgactaggctcgagcgaaacgactagagaagggggtcatcgattgcgggcaggggtcgttagggaggcgtaaagagcacagcaggacggcagaaagccagcctgtaaggaaggggagcggtgcaaagccctacttttcggcccagcccatgcggccggcgtaggcgacctcctcctggggcgtgacaccgtcgtgggtccagttggccgacgacgtccgggcgcggaacttgccggcgcgggcccggaagacctcctccatactgagaggcttcatccggccaaaaatgtcgtcgggattgtgcatttcctggctgcggagggcgcttcggatctcgggcgactgggcccaggccggcgcatccttgcccgaccgcggccggtcctcgtcgtccgagtccgagtactccgagtcgatgtcggcgagctcgatcgcctcggactcgccggggcgctcgacgcgaggcgactgctggccttgcgacttggagaggatctgcgactgaagcgcctggcgctgagcctggaggacctgcgcgccctgggcctgcgacgcccggttggcctgagctcccttcgggccgacgatcgaccggcccatgtcggacgtccgaaccggcgggcccatgctggagccgacgaggcggattgtcgacggcgccgtttgcgaggatccggccttggggccaggcggaagatggctgaaggacgggacgaccttgcccgaggccgcagcagccgacggtgccatgcccatcttggtcgcaatcttgccggtcggcacctttatcgacgacgggccaatcaacgattgctggcgcttcggctgcgagccgctcacggcggtcggcgcctgcttgcgcttcttcgactcctcctcggcggccttggcagccgcgagctgctgtcgaggcggcaaaaggttaattttgcggtcagttgagagccctggcgtcaagagtcgggcagcctcgacctgaactcacgtcgcgtttctccttgtcccgcgcctcgcgctccttgcgccgcttctccacctcggccgcgcgagcccggcgctccttgagttcctccatctttacgcgcttggcctcctcctcctttgccttctcgtcggcggccttctgggcggccgaccggagccggatagcctctgcaagtttggagacggccgcgcggcgctcccgaagctcttgctcctgaagagtgcaagaaggggcggtcgtcagcacaagtcccccggccaggagcaaggcgaggcaggctgacttttttggcggcctcagcagcggcctgcaggctcttgacatcgtcgaccttaggcttcttgcccgcaatcttgtcggccgccatgcggctgaagccctgcgaggacgacgaggcggcgaggcggctctcgggccggaccgaccgggtgagcgactgcttgagcttgctgctgcccgggacgagcgagttttcgcgcgaacgggccgccgcggtttgctgctgcggctacgataatcaatggcctgggagtcagcgccgagttgagaatggttagaaaggcaggccaccgtaccttgcgcggcgcgacgtccatgatgtgctcctcctccatctccgcctcggcctcccgcatcttcggaacaccagccgcaagccggtccttgggcgcgttgacgaggacgcgcacctcctcctcctcgtcgacaacaaccgacatctcaaggtcttcgagcgtcagctcgccgtcgttggacgagacccgcttcttcgggggtgaggccattggagttgttgtgttgtcgatagcagcggtcttgaccggccgcggaggcgtcgttccacggaagatggacgaggcggccgccttcttggccaccagggtcggtttagtgacaggcacggccggaggcggcgttggagggggggaggggctggccgtcgcgtgctcgaggtcgcccatgagcgagccgaacgacgaaggagcgttgtttgactgaccgttcgccggcgacggggctgagagtcgcttcggcgacggcggcagcgagctgatcgactgcgtgaggtcaatgatctcaaacgaccgctcctgcacttcgggagaagcgggtggcgagggagccttgaccgacgcagcgggcgtctcgttgacctccaagactaccggcgacggcgcgcgggggacgacagcctcgacgtcgtccgcttcggcgtcctcctttgcgctctcgacgggtgccttgatcgggacggccgtcgacggctcctcgagtcgctttggctcagcgtcctctggcgtcaggatggcgacgtcctcgccaaggttatgcatgagcatcgagccgaatgtgggcgtaccggccgcagtctggccggcgggcatcgtcagccggccgacgagcgactgattgccgaggatcgagccgccgagcgtgccgagcccgacagtgctcatgccgcggcccttagtccgagcgctgagctcctccatcgccttgcggacgcgcgacatgccgtcttccggttgctcgttctcaaacggcggcgagaagagagcgcgcttgaacggcgttgtcgaggagttttgagtcgtcggaagcgttgatgacgacgggagcggccgctcgtcaagcttgagcatcttggtcgaccgctgaagggccgagcggatcgtattgtcctcttcgtcgtcgactgtgtcttcgacgagctgggcttcgtccgatttgcgcttggcgccggcgaccttcggtgtggcatcagttgccgaggtggacgaagccggcaccatctcgcgctcgcgctccttctcgcgctcgcgggcggcggcgacgagtgcggcaccttggctcttgcgagctccgccggcaccaggaccaacgggagctccaatctctgcaccgccgagggccgaccgaagccaggaggaccggacgacggtccgcgatggcttgggaggcacggcgggcgcggcgtcggcagcaggcgcgacggcctcagcggcaacttggtcgaccgctgcatccggcgccgcctcttctacgccaggggcgctctcgaccgtcgcgaccatgggcgacgacggtggctcgacgacggcggcgactgaagcctcctccgggaagggctccacctccgtgacgggctgcggaagtactgcgatcagagctgcctcgacgaccggcgagtttaccgaaagcgtggcagcgagcgggcacggtgcagcctccgagacgaccgggggcgtgacgacctcttcgacgactgagaggcgatcgtctgccggcacaaccggcgacgcgtcaccagcttcctcagacttgttgtcgacgacaacgtcggccttgctctcgcgccgtgtgccggcctcctggtcctgcgaggcctcccactcggaggccgaggtcgccgccgtgcttgcaagagagagctggctgaataggctagccggacgcgacttgccgccgaagccagtcttgaccttgtcgtcgtcgtccgtctgatcctctccgaaggacgacgcacgcgagcgagtcgagggggcgagggccggagcgggcgtgtcgacgacgacaacgatcggcgatgatgggaccgcgggcgcgggcgcaggcttgctcgcctgcggggcagctttcgacgtgccagcgatggcgaccgtcttggctttggcaggggcgttctgttcgtagggagcgatcgtcagctgatgttgttcgtgtgaaacgggcgcgaggtcggccatgacggacctggcgagcagctgagagctcgaacagaggcggccggctgacaggcagcggcttgacggtcgccttgaccttcttggccgtagccttgccgggcgtcttcgccagtagagctggatcgctgtcaaggaaatcggatatgagctgcgagtcaggagcgctccgagagctggagagagccgccatggtcggtcggcacgggcggtcggtcggccaacaacacgcgccagcccgccagcccgcctctctcctccaagcacaggacttacgcgtcattcttgagggcatcctcgaaattgcaaagccagtcgtaggcagcctcgaggctctcgtcgtaggccgtgaaggacggcccgctctggtacttgggaatcacttggtcgacgtagtgcagctggaaggcgttgagccgcagcggcggtgccggagcgcgctggggccgaccggcgcgggacgacatcttggccgagagagtgcgatctgttcacgcagcgagcttgtccgtgcaagggtcctgttgatcttggccggaagcgaggggcttgatgttggttggaggacgttgggcgagagaagggcaggtcggacgcgcctgccttccgtcgtcgccgccgccgcgcgcgcagcggccccgccccctgctcccgcaggccgcagggtgcttcggccagcttgccagccaacggcctgtctgagctagagctggctgagtgtgctcccttcagaccaacttgacccaggaatccgttcgatgaacggccaagtgtcgcgcgacagacgacgggctgaagggtgtatcatcgcttgccggacaggccgccgtctcagccctgccttcatccttccttttcgcgccaattgatcgcagccgtgtgcatccagcaaagggctgagatgcaggcgcgccaagggagacgagcggcgatctgctccctgtcatgagactccccctcaacaggaaacacggtctcagcaaccaccgtggccgggggaagctgcaacagaaaatccgtcaacactctgtccagtctcaatgcgaaagacccctgacatcctttttttggccgatatccgaggtgccgagggcatatgcgagagcttcagggagaagcggccctggcggatggcgcccgtgaagacacggaagacgacggggaagatgtcgatcgggggctcgaatgagaagcgggtaggtctcccccaacggtcatgtcaggccataggtgggcttcgaagcttgagcactcctccacttcctcgaacaggcatagtccctgcaagttgggcgctggtcaatctgtgatttgggaaaagctcgtgagaacgatgaccaacctcatccttccatgttgaggcgagctcgatgattatgtacgtgagccaagtgacgcgagcggtgcgctctatagcctccttacaagcacgggagactgccggcaccgaaagacgaaattgtaggtaagtgcgagcggttcaaggggcagtgcagcgacagaggacactcaccctgccggccctggtgccagagccaagaagcgcggccatccttgaacaagagcttgtcgagccgatggccagcactagccaaggcggcctcgaggatcatgtcaccgacctcaggcggcagagtgcgttgggccgagcgtgagcgacggatcgacgtcacaggggtgccattagacggagcgaggctgcgaccagtatgagaggaaccggttagcaatggcgacagaggcgacggtagacaggactgtagacgtacatggcttcctctccttcagcagaggcgatatggtcgtaagcgaatggctctgctttcgagtcggggtcggcctcttcgctggcgtcgagcgtcggagggttcgcggccgcgtggagcgtagctggagccgttgactcgggcacggtcgcctggcgcacagaggatgctccggtcatcttgatgctctcttggaagagagagggctaggcaggtcggcctatcaagggtgatggtgagaggcaagccgacggcccggccgcattcgagcgacgagtgaaggcgtcgggccgcactgcaacgccaagcgagacgccccgagcctgaagatgcgctgtctggcgacctcatgattgctggcgtcgaaggaggcaatggcggccattgtagagcatggcagcattatatgcacagagagctgagagaccggaagaagaggatgcgagacgacaagtgtcgggtatgcgaccagcgggatccgccgatgaccatatgatgggaggaggaaggcgtccttccggggtaagaagccctgaggtcgacgagcacggcctccgaagcaagagcaagaggctcaggctgctgtcgacgcgccggcggccgctgctgggctgtagctccagatgcgggcgttgaggtcgcccgagccggtcgcgagcaggccagagttcttcgagaggtcgatcgagatgactgagcgagcgcgacgaggggcggtcagcatagagagaggaggcggatgagcgtaggatcggcgacagaccagagtttttgtgaccctggagcaggagctggacggcctttgactttgtgtcgtagaactggacgccccggtccttcgagcccgagacgacccaccgcccgtcgttggtgacgccgaccgaaaggacatagtccttatggcccttgagaaccgtctggcaggcgccaaagccagagccggcctcgccgttcggcagggcatcggccttgggcgcaggcgcgccggcggcgcgggagggcggcgggagtgagaggtcccagatccgaatcgagcagtcgagcgagcccgagcagagcatctggcaaaagggcagatgggagtcaggagagatgacgcaagacgcgcagataaagaagaggaggcgcaccgtgccatccggcgagaaagcaaccgagtagaccgagttggagtgaccgaggaagcggccgagctgctggccggtctgggcgtcccagagacgaacaacggcatcgagcgagccggcagcgacgagccggccgtccgggctgacggcgaccgacgtcaagccggcgtcaaccggcccctggtcgccgaagacgaggtcctcgacccggagatcaaacgtgcacgcgccgctctcaatgtcccagatccgggccgactggtcgcccgagcccgagacgaggtgcctgccgtccgaggaaaagtcgagcgagtagatctcctgcgagtggccctggaggaggtgccggatcgcccgcttgccgacgtcccagattcggatctgccggtcctcggcgcccgtcgcgaggaagcggccgtcgggcgaaaagcagatcgtccggatgtagaggtcgccctggccggctgtgctctcgtcctggaggacgcacgacttgacgcccgtcgcggcgtcgtagatctggaccgtccggttgcagccggtcgcgagccagcgcccgtcgtggctgaacttgacgcagcagacgatcgactcgtgcgggagcgtgtgaacgaggccgacgtcgacctgcttgcccgccttgggcgaccagaagacgacccaatcggagccttccttcttgagctcggcccgtgccgcctccggatcgatgtcggacgatacgacgacctgctgcgactgggccggtgcggcggtgacaagaggcacggccgcggcagcagctcctcctacggcggctgaggacggcgcagcgggcgtcgcgcgggatggcggcggcggcgggttcgaggcgaacggctggggcgtcgacggggctggcgtccgggtcgcgccgccggcgacggcggccgatgccggcagcggcgaatggatcgaaggcaaaggggcggcggtgccacccgcgttgggccccggtgtcgtcctcggggaggaagcgttggatggcggccggggaacggcagcagcagcagcagatgagggaggaggcgagcccgccgttgtctgcggggctgacggacctccagcggccgacgacaggggcggcgccgaagcctgcatggacgggagcgagtgattgctgccgttcgcatgcgcgcccgggccgatggccgcgagctgctggccgccctccttcttacggtcgccgacgctgccagtcatcgacccggccgacggcggcgggtgcgacgacgagccgctgcttccgagcgcgtggtgggccggcccgctgccgtgtgccacttgagggccgccagctgacgagctccccagcggaccagacataaaggcgccggcctggagcccgcgccggtcggcgttgctcccgtcgcccgagcgatggtcgcgtctgggcgagtgcatgccgcccggaggcagctggccggccgacgactgcgggaggacgggtagaggctgctgctggtgcggggcctgctgctgctgttgctgttgctgcatgtgcgcgtgctgctggagcgagtggccgtgctgcgggccgcctttcatgcccaggctggctggaggagccgccgagcgcgtgacctcgagttcccgccgcaggtgcgcaatctcagcctcgtagctggcagaaagagggttgcggagggaggggagggtgcgcaagagagcgtcagccgtcgtccagtcttcccctccccctccacgggcgggcacaagatctcatcggccgccctccattggcccacgcgcggcaggtgacgcgagcgaatcccatgacgagaatcaacgcagaccaggcacgagggtcaagggaactcaaggacctactcttgccggatcttgacgtgctgggcctcgaggtcgtataggttctggcggatgagggccgtctcctggatctggagcgcgactgtttcggttcggtcgtgcgacgagcgagaggcgcaaggcagcgtgcggcgagaaggaagtagccaggagagaggaagagggagaggaagaggaatcagccttccgtgcgtctaggctcccgctgacttgcgacaggcggcagggctggtgccctcgacaaagagtctgcgacgagcaggcacccgctcccggcgccatccgggtccgcgagggcgcgcaagcgagagaagaagcgcacgcactcttgctctccatgtcgtcccgctcgcgcttccatccgccggcatcgcccgcgaggagctcaaactccttgcggaccgtctcgagcaggtcggccaggcgggcctgctgggccgggccgaggaccgtcggctgctgctgctgctgctgctgactgttggtcggtccgacgccgccgcctgctccgccggccgggagggggccggaggaaggaccggcgccggcgggtggagcaaagacggacggggcggatggcatcccgttgcggtgtggatgggttcgagggagggggggagagagggttgccggagagagagagcgatccgatgggaggaggtctcgctgctcggcaaatggcgggctgagcgggactgccggaaagaacgcgaccgagggcagaagaggactgcggcgggctggatgcaggtgccagacggggttcgcagatggaggtgtcgaaggtcgggtgtcgctggtccctgtcactttgctggctagctgcttcgagtcggcgagcaaggcgggcgggcgcagagtgccgccgccgccgccccggccaggccgagagccctttgggatttctcgtcctcgatcgcacgcagccgagagccggcgccgagagcagcagcctgcttcagccctctctccctcccttcctcatcatcatgtcgtccgctctcccgacccagctcgtcccagaggaccacgccaacctcgcgctcgcgctcgagatggcccagcgttcgctcaagacgggcggcatcccgatcggagctgttctgtacgtcctcgcctcgctggcaggctgctcatgccccccggacgcccggacgacccctcggacggatgagctggagggtgtcactctggcttccgacgggccgttccagggaacgtccttctgcctgagctgaccctcgacgcctaactcctcgctctggcagctaccaccatcccacacgcaaagtcattgcgaccggccacaaccaggttcgtcccctcgccaacggccgcctgccctgtgcaaggctctgacctgacactctctcggtcctgccgccgctcaatagcgcgtgcagatgaacagcaatatccgccatgccgagaccgactgtctcgagaacctcggccggacgtcgatggccgtccttcgcgaatgcgtcagtcctttcgtcagaaggacgctgccctgcggcttggacgtcagcgctaactctctgtaccgtgctgtatgcgcctgaacagactatgtactcgaccctcaggtgcgccgcatcgggcgtttcgcatctgtggcaccgtcgactgacaaggctgctctttcgtttgcacctcctcttctcagcccttgcatcgcctgcaccggctccatcctcgttcgtccaccttgcgctccccggtctcgtcttgcccgctttggttggctgacctctccctcattccagctctacgcaatcccccgcgtcgtcatcgccgaaaacgccaatttcgtaggcggcgaggcccttcttcgcgccccgccggcgctcctcgcccctgcgctgcgccacgagcggatcgttctgaacgcagacatggcggaggcaaagcgggtgatggctgagtggatcgcgagctcggagggggcgaaggtctggtgggaggacattggacttgtcggggaggaggagcgctgaagagggttgctgacctgggaaatgggaaggtttcgtcctggctgagcctctgagggagggtccgtcaacgggacgagggtagcgctcgtcgtcgttccctctctccctgggcagagagggctcgaaaaggacgcagacctgaagagcgcatccaaggtgactccgcagaacggtctcttgccgtccgtcggtcggtgtagcccaagttgaagctcagagcagtcgcccagcttgccggcgatggcggcggtcgtttcagacgagtgcttgtattgctcgccccaccccttctgcgatgcaatctacttactcgaggtttcggtccgacgcacggctgccgtgatgccgcacaggctgtcgctcgcaacgagtggcgcgacggctatttagagagaaagaactgtgtcagtttgcctgagactgagtcgtcagagtctcgagactgacaaaacattgattcattgcaccaatatgtaaaagtagtacgttgcaaaagaatcagctggctgcaggattcgaacctgcgccctacaagaggaggtgatgatcgagttaattcgaatcaaccgccgtaaccacttggctaagccagctcgccgaaagaggtttgaggtaacatacatatattttaaaaacgtcaaaactgcacacaaaatatcctgttcaaactcgacttgatctcccactgcagacccgttccgtttttttccggcggtaatcggacaagatctggccgagataggcagagtcttgctggccggcggtacgcgtggccggaactgctgcgcgccgcctcctccgcctcgccttctggcctggtcgtcgcagccctccccttaccatcacccctaggacccttccgcaaaccatgtttaacctgagcgctttaagttggcctcctatagacgtacgcgacagcggcagcaccggccgccaaccgcgcggccgaggagcccgcgctggccacgcgaaccgcgacgaggtcggtcaaacgctcccctcgacgagcgacccctcctcccaggtacggcatcttggccgagagcatcccttaaacttctctgtggtgaggctgatgaccctctgcggcccgtatcgtctgtagcagcatcttgtagggcaccgctcgctttcggccgtcgccgctccgtcggccgagctcggcgacatgaccctccgggcggctgtcgccctaccgcctagggatggctaggcctccaacggtcgtcgaagagcagcatatgtgtggccgtgagcatcggcgaggtcagtccttcgctatcctctgtgggaaggcgagcaccgtcgctgactcccggatatctagcctgcactggatccagtctcgcactaggagcaggctacgtcaaagcatccgctcgtcactcgacgcgcttgagggtatacctcgatgtcgagacgcagggatggtgggcgcctcctctgccccaaaggtcgtcgcacggccttcaggccaaactctgcagacggtgcgcgccttctttcgacatctagaagaaccccttacaaatagagtcgttgatgtatttagagatcccgatgctgacatcaagggaaccttctgcagcacgctctgcgaatcgctcgaccgccatgccaggttgagcccggtcgagaagatattgtcgcgagctgcccttggcctccgatttctcagttgtcccaagcgatccgctgcgaaccgctagcagaccgtagacagtcttgtaggacgcttgcggttctggctgagtgttcgaggcgtgtgctcgtccgactccttccttcagcggcgggcgatgccatgaccccttacccttccacgattgcgctcgaccggtcgcttggcgcgctgctgaggataaagtacccctacgccaagtcctctctcgctcctgcgcatggcaggaccactcagagaatgaacgtcaagtggcgccggccgctacgcattccggcccgccggatcgtccgtccgcgtgccggcatggcacgcagatgaagacgacgcgacgggcaggacccagcggccaggcagcctgaagcttctggccaactgcttgcagctctggccccctcctcctccttctctctcccatcccacttgccaccatataagtgtcgagcctgctgcctgcgccgccatctcgtgcacaccttgcccacgccggcttccgacgcctctctgcctccgacggtcagccccgtcgtgcccgtctgccacccatctctatcggccgagcccttcccgccccttgctccctccaagcccgccaccctgtgatcgcacgggcacgcacgccctctacttctcatcctcgccgctccctaccaatcggtccccggcgtcctgctcggccgatccagctctcgtccttcgcctccgctgccgcgcacttccgacgggcgacgagatccgcacgctctccccggctctcatcgccttcttccactcgcctccctcatccaccacctaagcccactggtcccactggtccatgttccgctcgccaccacctgtccaccaggcgctagccggccaacggccgccagcagcatcgccgccgacgctacctcgagcccgggccgccgccgctgccgggagcatgcgagctgctgagtcgagcggcgatggctcggccaagaaggctggtgcgtctgcggtcattcggctgcctagaagtcgacctctgaggtctctctgctgatgcgatctcgcgctcgcctcccgatccggatgctacagctaaggacgtcagtcatgtgccctgccgcttcttccgcagcgggcagtgctcggccggctcgagctgcgtctttgcccacgtcgtcgccgagcgtacgtccctgctgcctggcggacgtcatactcgctacatgactgacgctgacccgctctcataactgccactgcagccggccagcagaagcaggtgtgcggctacttcctcaagggctcctgcaagttcggccacaagtgtgcgtctaggcctggtcgtccctgagctccggccttcaactgacgacttacctggttgatgtgccctgcaggcgccctcgctcacatccggcctggcgagccaatgagcatggatcgcaagaacaagtgcgggcgctctcccccaccctcttgaagcgccgagagctgatccgcaaactatgcctcgcgcgtcactcaggaaggccgcccagctcgaagcgcaggcagcagcccgtgcggccaacggcctgggtggtgagagcattggtgcgaccgccgcaaacggagctcacggccgcgggccgaacggcttgggtccgtccggagacaatggccggcctttcaccggccagcagcagcagcagtcctcgcaacagcagcagcttgcatcaccgcggatggtagaccaagctcgaagcggccagctccatcagcattcggactcgagcttgctcacgctcgcctcgctgtcataccagacgtcgccgccaccgcccgggtcgacgggcccgcaggcttaccagcagccgccaggaacgatcggctcgcctcgagcgccactgtcaggtctcgacctcctgaacgctgcgctcagtcaggcaagcctcggcggcggcgctgccccttcccctccggcaaccgcgcaccacccgaccagccagtcgcaactgtcttcaacgctattgccctcggcacctcatctgtcaccgacaccgccgcaccgaccgccgttccctgggtctgcctcgcattcgggctcgggcctcttccagtcgagccatcatgcctcgcatctggtagcgtcctccggtgcgtcgagcgctggtggcggcggcggtggcagcggcggctcgcccttttcgacttctccctttgctgcgcctgggtcgcgggcgctcttcctgtcgtcttcctacgacgcctacgcacatgagcgcgatggcgccttcccaagctcactgccggcatcaacgctccggacggctggcgcgtcgcacggcgtgcctcgtcatccgtcgtcggcccgtacacgcagcttcctcgacagcagcaccactcgatccgggcccgacagcaacggctcctcggccgacgaaggcctggacgacgacgacggcacaaactcagacgacggcgaggagtttctaccgtcaagcctcagcgagctcctgaccgagcacgagatggaacgacgcatgacgcgccgcaactcgaaccagccgcagctgcatcggccgacgctagggcagcaagctcactcgcagcagcttcagacccatgccgctctgcactcgacgagcgcggcggccgccttcccgattaaccggctctactcggacactggcgtctacgcccgggcccgagagggctcgccgtccggcccgtggatcgagtcggtccccgccgcccatccggtctctgcgggtaaacgaccagccgacgacctcgagcgcacggtcggccgtcgtcactcggagcggccgccgatgggcggcgtctttgactcgctgagcggcggcagcctgtcacgctcaccggcagcgccgccggcgatgtacgactcgacccagacgctccggccgaccgcgtatggcagcagcggtagctggcgcggggacgacggttcgcacgacggcccgttccgccacccatctacatcaccggcaacggctcaaccggcgcggtcgaaccttgctgcgctctgggatcggtcggcagccgcatcctacggcgccgtgcctgcaccagcagcggcgacccagacgcggcacggcttccctctgtcgtcatccccgtacgccggaccgccaggccagccctcgcaccaccacctgctcggcacgacacaccagccatcccacctccggcagctgccgacgtcgcagctgacgacgcccggcatcagtggcggcactcagccgctgatgtcgccctcgtcgcgcgcgctcgcctctcatgcgccgggcatgtcgctccctggcgggctcggcgtcacgctctcgcgtctccactaccaaccggcgggtacgcttggcgagggtacatcgtactcgtcgaacggcctgcccgaccttgctggcctcgcctttggcaacgtcggtaatcggcctccggccgacgacgacgggccgacgggcacgcccgacccctggcggacgctagtaggtgacggctacccggccctcagcggcgcgccaccgacgatccatcagccgacgccgatcaagactggcacgacgatcgccaaccgggcagacgaggacgacgagttcgccgacgatgtcctctttgactagagcgagacgtcggtcgtcctaggccccgtctcatcaacccttgcacgagcagccccccccctcttcaaatctcgtctctcaaaacaacctgtcaggctccagcctgaatttcctcgcccaactcataatgctccccccccccgctttattcgtcacttggctcctctctctgcgctcccgttgtacgtacgctcgctcctacccacggctcactcaacgacaacgatcatgacgctcgtgtccgcgtggcttcgcgatacgcgcgctcgctctcggacggtcttgtgaggaacggcgtcgcatgtgatactgcgactgtcagcgatcgacgaggcctgctcactcgtcctcgtcctcgtcggcgatgacgacgcggcgcttcttaatctcgcccgcgccaggcccgtcctcgtcgtcctcgttgtccatctcctcgctctcgaccgacacctcgcgctcgcgacgcctctccttgccgcccttggaccgcttgcgcgagcgcgcgtcctcctcggatgaagcctcttccgactccagcgcctcagcctcttcctcggacgaggacagcgtcggcgacgcccggcgcttcgacttgcccttggacgaccgtgaccgtgcgcgcgagtcgtcttcttcgtcgtcgtccgagacctgcgtgttcaacagactgtcagcgcgggcagataaacgaggtgggaagggcaagctggaagggggggggggggggaggacgtacgacaaagccgtcgttagcgtaccctccaccgtcgtcagcatcacgtgcgctggcgccagccttgccaccgcccgtgttgagacgccgccggcgccgccgctcttcctcctcgtcgagctcgctctcgctgtcgtcggtgtaaatgctgccgccgcggcgaccccggccggcggcggccgcgctccgaacagccttcttgcgggagctgccgccgccgtcgtcctcgcgcgggccacggaccgtcttggcccgggccttcctgatgccaggaatgtcgacgttcgaggccgtcatcttgtcctcgtcccacatcttcatccgcgacttctcgcggttgcgctccttgacgccctttgcgaggatgcggtgagcctcgccctccatgccgacgggcacgagcgtcatgtggccggcatacatgccctcagtctgcatgagctcggcgtcccagtggtggttgacgaggtacgactggggcgcggctggatacgccggatccgggtgcgagacgagcgagaacaggttagaggccttgccgagctggagcgagagcgtgccgtccgaccacttgacgatgcgcgcattgggctgcttgatcggccggccctcggcgtcctttgtccaccgccagcggatcgtgctgccgacctggcgcatgagctcctcggccttgcgccgctcaatctcgatggccgtcagctgcacatcctcctcgagcagctcgggcaggaccgggtcagccggctcctggtagagctcgcgcgagtacggcatgtgctggtggtggaccgtctttggcagccggagcagccagcgctatggggggagatcggggagggaagctcggcgtcagcttaagctcgcagctagcgcctgctgttccagtccaaggcagcaactgaccttgccgtccgttccctcatgagcctcccaggttatcgcgtccagctgagcctcgaccgcctgcgacttgacgggcgctcggttgaccgagccatcgtccgagccgtcctcggcgtactcgagcttggcccgccgctcacgaacagacgaggtgatgctgtcatggtcggagaacatgggctcgtcctcgtcacctccagtcctgcgagatagcacagggagctggtcagtgctggccggccagtggcggccgtgtcgaggaagactgactggctgggctgggccgagtcctcgcggccgctcgcgtccatcatggtgtcgtcctgctcgtcgtcgtcgtcctcgtcgccaaagaggtcggcagcgtcctcggcttccgcatcgctctcgttcgtcttgacgtcggccgtctcctgcttgacatcggctgtcgccggtgccggcgacgagtcgcgcatctgctcctcgtccttgagcgagccgccggccgacgacgccggcgacgaaggaccggccagcggcgggagggcggcagcagacatctcgggcgacggcgtcgggccggcgggaggaggcgtcgacatcctggaggcaggcgaggggtcgctagttgagctgaaggcggggttgaggctgtacgagaaggttgagaagagaggccagtcggcggcgagctggagttcgtcgtcgtcgcgacggcgcggcgcgggttccgacgtgcctctctctccagcgctagactcgccctttctaccaaagtcgcctctatttgacggcaggcataagagcatattggataggggcatgatgagcctgcgtaaaaaaatggtgggcaggcaataggccggggcagagcagacagacgggaaaggagggggacgacaacaaaaccacgagaggatgagaaagagagagagagcggtaggtcggacagacgatagtgggcagggcccggggtgtgggataggagcgagatggaacggaaggggtatctgaagagcgacggctcgttgcccgggattgattagatgcgtcgtggcgtcccgggcgagcgcaggtcgggcgtcttgggcgtcgggagcagctgcagattgacgggcgacatcgcgttggtgaagaggaggtgcttgagatcacggagccggttctgaaacgacgatggaaaggatgtcaggtgaagcatggagaggcagcattgagtcgggcctgcgtacctcgtagtcctcgatgacccgccgacggaggtcgcgctcggcttcgagctcgaggcgtagcgagcggatgactgcgtccttgtcgtcgtcgtcgtcggcctcctcggtgatggcggccttcttgaccgcgccctgcgagggacggcgcgggccgaggccaacactcctcggcgtcggaggaacctgctgttctgcgtcggccgtcgagctgcttgcagcaggaggagcgaggatgccgccaaagccgtgggtggagtgagttgacagcgtctcgccgctgaaagcgggcaacgttggcgactggaggtgatcggagaacttggccgagaacgccatcgagactggccggagctcgagattaaagtcttggccgttggctagtagggaagccgacgatggcgaggtccccagccggggcgggcggcgtcgggcgatcggcgacgtcggatgaggcggcgacgagggcgacgaggtggccgacgacgagcgagagatggccggccggaggctgtcctcgcccgcctgctggaggagggcctgcggaattgggaccgcgttggccggcgcgggcgtcggctgcggcgccgaaatctcctggatgggtgcggcatctggagcctgagcgccggacgacttcgcaaagatcttgcgcaagccgccagaggcgctccttcggggcttaaggtggcggtcgaggtagccgtcgctgctctggctgaagcccggcgagggcggctcggtggggaagcgagaggtctgaggcgatggagggatggacgtctccgacgggcgccggccggccgacgggacggatctgtaagggggcagcgcaaagtcagtctagactccgctgaacgaaggtgcagagtgcgagacggacggcgacgggggcgcatagccgagcgccttccaggcggcactcgcgtcgtcgccttcgcggtccttcttcctgcgaccgagactgctaatccacgcccgcttgcccttgccggcctcctctgcgccgtcgggctcgtccttgaagtcgggcgagcttcgactcggccggaggagcttgaggtcagtcatcagcggcaggtcgccctcagcgtcgtcgaagccttcctcctcccaaggcgcaggcccatcgcgtcgaatcttgggcccgagggtcgacagccgcgtccgccgttcggtcgggcgcgagtagaggtcgttgaagtcgtcgccgagggcagcggcagggctggtgccggcctgcgggtctggcgagggcggcagagccggctcgtcgtccgatggggttgctgagggcggagcgagtgagggtggcggcagaaggtgatgagcttgccagggcgagctggatggggtgcgatgcgtggttggcagcggtggggcggccggcagcggtcgcgttggcaagccgaccggcgtgagcggggctggatcctgcgtgccatggtcctcgctcgtaccatcgtcgtcgtcgtcggcctcgcgagactgtttaaccggctggaggtcgcccgtctcctggaggagccgctgaagcccgtcaatcatcgtcttgccgccgcccgactgccggctctcgacaaccgaccgccgggcgagctcctcgagtggcgagagccgcgtctgctcagtgatgagcgtccgtagacgatgctcggcgtcgctgatcccagactgcccgggtagtggggcgagacggttggcccgaagaagagggctcaagggcgggccgccgctcgggcgaccgggagccgacgaggtcgaaggctgcgacgcgtccatagctggcgaggtcggcgggccgggctggacctagctttaaggaggtctgctcgccggtcggctctgcgtaccctgcggtgagtaggatgcagcacgggtgacagggactgccgacgcgtcgattcgagcgggcttgtggcggaagcgacgacggaggggcactaatagcgcgtccgtgacggatggtcgcagcgggttgggacgggtaggcgcgtccgtccgcgacttgggcgagctggtgacggtcggacgagcgagcgaggtgctggtgggcttgtgcctcccgccttcctggcctgggtgcagaggagctgaagggaagaggagagcggcggtggcagtcttgagctgaagcagtgtcggcgcgtctgacacgacgacccacgcgcgccgagccatgcatccaacgtcgtcccgtcgtggcagggcagacaagccagcgccgcttgcgatatttcatcctatgaagtcctagtacagcaacggagctcaagctatagctactctgctggcatcaccaagagacggagctgcagcagagacgtcgaagcaaggggagggccaagctggacgttgtcggccgcgtgcccgtcgcgtgctctgccgccgcaagccgacgagggcgaaaccgagtgggcggacgacagccggccgtcgactgctcgcccgccgacagcatcgtcgcctccccctccttttgctgacccctttcagctcgacactctcgaaagagaggatcgagagaggcgggctcaggcgacccgtgggccgcggccagcccgcattcagtggcggccaggcgtggcttgcccggacgacatgaaaggggcccgtctctccctgtcgctgatcaaggggagcgacccttcgatgctcactcgctctttgattcgccttcagctcgctcctcgagcagggcccacgctcgacagccaccgtcggcgagcgccttgggggagcagatcgcgtgcccgagaaggaacgcaacttcctcttcgccccccatctaacccccgttttgcctcgccaactacgctccatctcgtcccgccagccagcctccgctacacctcgctcagcagctacatcgaccagcgcttcatcaatcatggtgcttgaacgtgcctcgtcaccttgttctggagcagcttttgacgagcttctgttccctctcgctcgacccagggctgcggcgcatcatctgccatcgtcgacgttgaggcgcgagaccgtgagcacacgcaggctgcagcgcttcatccctctccgctctcgggctgacctcgaccatcccctcctcaccgctcaggcaactctgcgatcgagcgccagctgaaggaggacgagaaggccgcacggaacgagatcaagctgctgctgctcggcgcgggcgagagcggcaagagcacctgcgtcaagcagatgcggatgctccatggagagtgcggccgtgagcgtctgctcttatcactcaactagaagctgacagcttgtcgcccgactcgcaggacgtacaccaccgccgagcgagacgccttccgcgagatcgtcttctccaacacaatccagtcgatgcggtgcgttgcagctggagggaactccctttgtcacgctcgctgagacctttcctcgccacacagcgtgctcgttgacggcgtcgccctcctcgcgatccccatcgacgtttcctgtcagccgtttgcccagaccatcctcgacgccccgagccagctcgacggcggcccgctcgacctcgcttacgtcgacgccgtccagaagctctgggccgactgtggcatccgcgcagcctacgagcggcggtccgagctccagctcaacgactcggccgagtacttcttctgccaggtcgaccggctgagcgcccaggcataccggccgaccgacgaggatattctccgcgcccgcgtcaaaagcaccggcatctcggaggtcacggtcaaggtcgacaccctgatctaccgcatgtttgacgtcggcggccagcggtcagtcgctcgatgctcgtggggcctgtagacgctctggctgactggcgcgaatcactcctctaggtccgagcgcaagaagtggatccagtacgtccttgttccctcgattccttgccgtctgtagttctgaccgaactctcttctccactgcgacagctgcttcgaagacgtccaggcccttatctttgtcgccagcgtgtccgagtacaaccagcggctctacgaggacgaggaggtcggccggatggaggagagtctgacgctttgggagtcagtcgccaactctcgctggttcctctcgaccacaatcgtccttttcctaaacaagcaggatttattccgcgcaaagctcgagcgccacccgctcggcgactactttgacgactacgacggctcgacctttgccgatgcccaggccttcatgaccgcgcatttcctcaacgtcgtccagcgccacaaaatctactcgcactggacgacggccacctcgacggagcagatgaggtccgtcgaagtcggtcgctggctgtcgtcgctcagcagtcttgactgacgctgatgccacctctccaggttcgtcacggccgccgtccacgacacactcctccagcgcacgctccaggaggccaacttcatctagctccccttcttacgacctcgttctggccctctctcgttccctctgacgacgccctgctgttacttatgcgctttccaccgagattagaggagcaagggaaacatggatcggtataggcgttgcaaaaggagaaaggtgtacaggacgggcgcgcagccgtgcagaagcaggagacagaacgagggaaatcggatcggaaagcaaaagtgtcggagcggtcagggaaggggcgcgcatctctaggctgcggcctccggggccgactcctcgtagtgcgggatgccgcgccggagcagccggaggacttcggcacctcccggcggcagctcagtcttgtcggcgagcgcgagccggagcaggaaggcaaagtcggtgtgggcgacgagcggcagtgtcgactgccggcggcccgacacgcgggtctgctggctgtcaaagaactggtgcgagactgcctcggcccgggtgacgacctcttcgggcacgcctgcaagccgggcgacgtctaagcaagggtagagcgattcgcgtcagcttcgattcgagggtcgccggcgagggcggcacgtacgggtgccgtggctcgactcggccttgccgtcgatgagcttgtagaggaaggtgacctcgcgcttctcttcgtcgacctgcgtccgcatgtgcatcggccggacgttggggtggtaggcaaagtcgtcggcgagcgagccgtaatgagtctgcaaaaagggatcaacgtcagcccgcagcatcgccaacgacagacctcagaaaacgaacggcaaagaaaccgagcggcaggctcttgccggcgaggtggtctgacaggaggaaatgtgtcagcgcatgctccgatcgaagaaggcgaagatggcagcgactgacgaagcaccgcgccggcgatggccatctacagagcggcgacacggtcagtctgcgagcaaaggtcgagcaagagggaagaggtcgacgcaccccgtcgtaagtcgatgttccgcggccgagctcgtcgagaatgacgagcgaccgggggccagcctcggccaagatcttggagcactcgtcgagctcgaccttaaaagttgaagcgtggccaaagagcaggtcgtacgcgcccatccgggtgctgatggcgtcgacgggcgagatgctgcggaagacgacaagtgagtcggtcagactaagccctactagggccggccagagggtggagacgactcacgtagcggaagcggccggcacatacatgccgagctgggccatgatgacgccggcggccgtcgtccgcaggagggtcgactttccggccatgttcctgtgcggcgggcgagtcacgtcagccaggccaggcgatgcaagggtcgtcggagaggctgctcacggtcccgtcaagagcaccatcttagcctggtcgccccccatctcgacgtcgttcggaataaagtcggcgcggaggcacatggccgggtgccgcaggctgtcgaacttgacgagcgcgtggtccgactcgacaaacgtcggccggcatttgctgcatgcgagagagcacagcgagcgagaggcgtcagacgatgcagctgaggaagccggctgctccggtcgacactcacggctcgtcgagctcctgtgaggcgacggccaggctgccgaggcagtcgagctcgccgacaatcttcaccgcaaggagccacgtgtcgcggtcgttgtcaaattcggcgagcaggcggcgaataaaggccctgatggtctgcgtgcgtgtctcgcgcgcctcctgcaactcgcggatcaccggcgccgtctcgggcgaggcataccggttgaaggccttgacgccgcccgtcttggtccacgacttgggcgccttgaacttgacgggcacctggatttggtagatctccttctggccctgggccgagtgccagtacgagaggtcgcggcagccaatctccttggcgtggtcgcgcaggaggtcgtccagctggcgctcgagccggtcgatctcggcctggacgtcctcgtacgcctcgtcaacgccgtcggccggaaggacgtcgttgctctccttgtcgaaggtgaagagcgagcgaatgtgctcgaggtggggctcaaggtcgggcgccgagcgcaacagggccgaggtcgaggtcgactcgaacgactcggcgaggccggccaggtttgacaggccacgctggactgcgttgaaggcctgcgttgggcaaaggaggcggcgtcagcagctgacgggggcaatgaggcccggttgagagggtatgagggaccgacatcgagcacccgcataaactcgccgaccttgcagttgctcgcgtgaatgcgcgagatcaggcgctcgaggtccggcaggccgcgcgagagcttcttgaagtcgccgaggaaggtcgggtggttcatgatctcttcgaccgcatcgagccgggcattgatggcggccgtgtcgcggagcgggtggcagagccagacgcggaagagccgcttgccgaacggcgtcacgcacttctgcagcagcgcatagagcgtgccgtcggttccaccctccgaattgacgagcacctaggcggaagcgatccagagctgtcagcatcgctgcaacccaaggcacacggttgcgattgcgcacctcaatgtgggcgagcgtattgccattgaggacgagcgacttgttggcccggattgggtcgtagacgtcaaagttctgctggctgagcaggtccttgtcgaggttaagctgctggagataactgctcagagggcaagttgtccgcgcgtcagcattgccttgacctctgcacagcagggctgatcgaggagtacgcacgagagaaggccaccgagcgctcgcaggacaagctcgtcatccttgaagccctcgagaacgtctggcaagggggcggccatcttggcgtcctcgccgtcggccgcgggcgcagcaaagtactcgccgagccgctcgagcgtctgctcgggcgcgagaaactcgctcggacgcaggctcgaccagacgcacgacgacggcaggacggagcgcagcgtccgaagcgtgttgacctcgaggttgcccttctcatggatcagctccttcggctgcagctggcggaacatcgtctcgagcttagtcttgacgatgtcgtcctcgaagctgctgagcgagaaggcgccggtggcggcgtcgaggacgacgatgccaaacgacgactgcccggcggcgttgaccgtctcctgcagagagagcaaagtttaaaggagtgcggagtcagaggcagtgacgtagctcgggttgcgagcttggcagacggaccttgatcgcaacgcagtgcgacgcatcgtcgccggcgaggaaagtcgcgtcggagacttgagtggtgaggcgggtctcggtcaacaaacggctcgacgagcgcaggcctggcacattcgcacgcacccgtgccgttcgtcaagaccttcttgagctcccggcggacaatcttctccgactggctgaccttcttgcccttgatcgccttttgccgcatctccatcctggtgaaccaagggagggcagggtcagcctggatccgatgaggaaaaccaagtgccaagactcacgcgagggccgtttctgcctgctctacacggccgaccttgtctgaacgagggcagtagagagatcagcacaatagcggcaggccggcttgagtgcaggacgtacagcctgcggcgaggaacttggcagccctgtttgacggcgatggaagagaccgtcagggctagtgcagcatgcagcggtcaggaggcagaacacgcaccacatctcaaagttctgttcgggcacgccaaccatgcacatcttgacgcggtccgtcaacttgaggtcgaactctgagttgccgatgcgagcgctgaccgtcggaggaggtgcgggggattctgtcaggcgggcgttactctgtgcaagggggagccgacagcaaaggacgcactcgttctcgtacagctcaaagaacttgcccttttggaaaaagaggatcgtgtcgaagtggttttgcttgatttcccagaactgcgacgagtggaaacaggagtcagcatccggcgcatggaccgcgaggtcagaagactggtagccgccgcacctgggtctcgaacggcgtaaatttgtcccaggccttgcgggggatgtagagcgtccgagggtcatagtcctcgtcgccaggccggtggccgtcggcgtcgcggaggtcgacgagaaagtcgaagcagtccatgtcgtccttcttttgctgcttctcggccgcccgtcggatctcggcctgtgttaggaaggcactgctgctcccaccgccgccgccaccgctcgcgctcgccccgctctgcgtcggcttgatcgacggacgagccggcgggacagtcgactttttgcgtgcgactggcgcggactttttccggggcgcgaccgtcgaggcagacgagacggacgcgtccgtctccgactcggtcgtgccgatgttgtcgtaaccggcggcggcagctgcgcacgggccagatgcaaagggtcagacttgtgagaaggcgcgactgtatgcggcccattccgtccctgagtagtccgtcagagcactctcgagggcgcaaggagggacccaccgatgaggtccgcgtcgtcgtcgtcgagctcaaactcgtcgtccgagtcggcgacgctcttgcgcggcttcttggcggccttgccggcggccggcttggccttcggcttggtggcctcgtcctcggtcccagaaagatcagactcgacaatcgcagccttgcgcttggcgcggaccttggcagagcaaaggggaggaaggaaggaggaagtcaggacagtgccgttggcgcaaggaggctcgcgcgcgcgtcgtccgcacgcgctggccaggtcgcacgcaccgagcggccaaccgggtgctcgtcctcgtgattttcgtcgacgtccatgtcggtcgtcccactaggcggcagatcagatgtcggcgcagccggctcttcaggctcgccgtcctcagacaggtcgatgagggcgccgttctgggtcgacgaagcggccgagctcgccggcgtcggcaggagagcgccgagcgggttgagcttcttccggagcggctggatctcggacgaccgattcagcgggctcgagctcgccgggacattcttgctgctgctcgagggcgccgccgtcttgggcttggtcgacgatgaggcggcggcagcggcggcggtcggcttcgaggccgaggacgacgcgccgttcgacgctggccggaccaagggcgaggacgatggcggggccttattgaagaagccaaagagggtcgtctgcttcttttcgacgaccggcgtactcttaggcggcatatttgggatgacagaggggaggagggacgagattgatggtcgggaggtcgtcaagccgccgtcgcgcctccggagagagctcagcgcgtcgtcttcgccaggccgagcgacgcgtcgccgaatgagctgcccttgtcggcccgctgcctcaacctcgaccacgacccagaaactccgagcgctcctctgctcaccagccctcatctcatctcagtgcggctgctgcgaccatgctcgagcggatcgagctcaaggacttcaagtgcgttccttccctcctcccttccgccgacgtcagctctgcctccccgctcggaccatgtcgccttgctttcctctgcgaccggcttgtcccttgacctgtgccagacatcattctgggcatcgcagtcgacgctgaaattaccgccctccctcctttactcaggtcatggcgaggcctgcagacgatcggccccttccagccgttcacctccatcatcggtcccaacggctcgggcaagtctaacctgatggacgccatctcgttcgtcctcggcatcacgtcggcccacctccggtccgagcggctccgggacctcatctaccgcggccggaggctccggcgcgaggaggagacgcagccgggcgagacgtttgacgaccaagacagcgaagacggcgcacccggcggcggcggcggcgagggcgacgcgcgcgacgcgtgggtcaaggctgtctacaaggacgagaccggcaaggagttcatcttccagcgctcgtaagtcgggacctctgctcgctgtcctcttgtcgttcgagggagggctttgctgacgggaccgagatgaccgttgcagcgtgacgatggccagcgggtccgagtacaagctcaatggccgggtcgtcacctacggcaaatacaacgctgcgctcgaagcgcacaacattctcgtcaaggccaagaactttctcgtcttccaggtacgctcgcggcgtgcctgtcgttgtcgtggtggcttgaagctgacacctgcgcaccgaccttgtagggcgacgtcgaggccgtcgcgcgccagtcaccaagggacctctgccgcctcatcgagcagatgtcggggtgggtcatccctgcctgtccgtcgggtggcctctcgctgacccgattgcctgcctgccagttcgctcgagctcgccaaggagtacgagacgacgaaggctgtcctcgacaaggcgacaacgctctcgaccgagtcgtttcactcaaagcgcgaggtcgcaaaggagttcaaggcgttcaaggagcaccagagcgagtcgaaacggctgacgaagctccggcaggagaaggtccgtccgcttcgctatctgaagcggcctgcggaatcgcgcactgacccgcctttggcccggacgcaggacgagatcgtgctccagcacgtgctctggaagctctttcatatccaggccgggatggactcggccacgtcgtcgatcctctcgacgaacgccgagctcgtcaagctgcgcaaggagcagggcggcgtcgagcgcgagattgccaaggttcgcaagcagcaggccgagtttaagacgcagatctcgagcaaggagcgcgggctcaagggcaaggaaaagagcctcgaccaagaggtacgtccgacaggcgcctgttttggttagaagactcgctgactcgcgctcgtcgtcccaggctgcgcggctcgtctcgctcaagacgcaaattgagcactcgatccgcaagattgagaacagcaccgtccttagcggcaaggtccgcaaggacgaggagcgtcagaaggggaccgtcgccgagctccagcggaatctcgcccaggtcgaggcgctcgcgaaggaggccgaggacgagcagcggcgcttgagccagaagaagggccaggcgctgagcgaggccgatctggccgagtaccggcagctgtgcgtcctctcgccgagtcccaaggcgcagcgtcgcgagagctgaccccaacctgacgtcgcctgacttgcaggaaagccaaggccaacacgctccttccggacgagcgcgcctcgctcgacaatctccgccgacgcgagaagacgctccgtcaggagatcgagatcggcgaggagaaggaggagcgcgtgcggcgcaaggtgacgaggctagaggctgagatcagcgacctcgagacgcggaaggacggcgtgagtgcgatcctctcgcgcgctcctcggcatccatcagactgaccttgacgctcccaacctacgtcaccgcacaggcggaccgcaaacgcgagagcctcgagtcggaccgttccaaggccaagaaggatctcgagcatctgcagtcggagcggacccgcatctcgtacgtcgaagctcgtgcgcatcgtctccgagcgcacccttttcctgaccggatgccgccgcggacttcctgctcaggcaactcgaaaccgagacgaacgagaagctccaagcctgctacgccaagctcatccaggccggctcggaccggaagcagagcgagaaggagacgcgcatgaaggaaacactcgcgacgctccggcgcatctatcccggtgaggagtgctctcttgcagcgcgtctggcggacgagcgcctgctgacctcccgatggccggctcccaggtgacgtccacggccgggtgattgacctctgcaagccgacccagaccaagtatcagacggcagtcagcgtcgtcctcggccgcaacattgatggcatcgtcgtcaaccacgagaagacggcgatcgagtgcatcaacgtcagtcgaccgcgacacacgctttgctgtgaatcgcgctgacaaaagcatccgtcgctctgctcccagtacctccgcacgcagcgcctcggccaggccatgttcatcccgctcgactcgatccaggtcaagccgacgaacgacaagtaccgtaactttgcgcgcggcgcccggctcgcgatcgacgtcatcgagtttgacccgcagtatgatgcggcgatgcagcatgcgtgcggcaactcgctcatctgcgacacgatggacgttgcccgctacgtctgctacgacaagcagcaggacgtcaaaggtgagccgttatataatctcgtgccgagcgaccgtcggcgactgatcctcttgcttacgtccttctccagccgtcacgctcgagggcaccgtcatccacaagagcggctcgattaccggtggccagagcgcacagggtgccggccggaagtgggatgagaaggagatcaccagtgcgtcggcagacctctgacgagggagccgtcagcagtcactgacgagcgaagccccccctgtcctgtccagacctcggcaagcagcgcgactcgctcatgaactatctcggcgagctgtccaaggcgcggccgcggggcaagtcggatgacctgctcatgagcgagatcagccgctgcgactcggagctcgccctcgtccgcgacgacctcgtgcgtagttcctgcgaagcacttgccgaatgcagccggctgatgatcgcctttctcgtcttgacagagcgcgaccgacctccggctgacgagtctgcagacagagatcgaccacgcccgtacggagctctcgtcgacaatggccatgctccgcgacgtgcgtccccggctccgttgccgcctgcctggcgtcccttgttgcggccgctgatcctaacgatccatttcctttcttctacgcagcgccgcgcatcgctcgcgacggtcgtgcaagaggcggctgctgtcgccgaggccgtctatgcgagcgaggatgaggtctttgccaacttctgcgctcggatccgggtcgacaacatccgcgagtacgaagacgtccagctccgcgtcgccgaggcgcagaccgaggcgcgcatgcgctacacggcccaaatgaaccggctccagaggcagctcgactttgagaacgagcagctcgagcacacgcagagccggctgcgcgtgctcgacaagaacctcaagacggaccagcgcaacctgagccagctcgaggctgacaaggccgagctcgagcgggagattggctcgaatgagcgcgaggccgagcagattaagaatgatatcgaggacctggcggccaagctcgccgaggtcggctccgagctcgacgacatcaagcggcgctcgcacaaggcgacaaaggcgtttgaccggacgatgaaggaggtcgcggcatgggtgcgctccttcgcttctcgacactctcgtcgccgctcgaaattgacactctgcattccttcctgtcacccagaacgacacgatcgccaagctcgggtccgaacgggcgagcatctaccgccggtgtaagatcgaggatctcgaccttccgctcgaggacggctccctcgctaacgtctcgctgcaggatcttgacgtgcatcgcctcgttgcctctttacgcgcgacccaggccctcagctgactctctcgcctatccgctcgccggaccgcaggccgacgagaccgaggccgacatggacgtcgacgagccagaggacggcacccagcagccgctcaagccgcgcgactacggcctcgtcatcgacttctccaacctcgccgaggaggaccaggaggtgcgcacttgacctccaagggggcgacctctttaacgacctagccgactgacacgtccctcatgtgcagaatggcgaggacgagcacggcgacgagctcgaggcccagatcgctcggatcgagtctgagattcagcacatggcgccgacgtcgaaggcggccgaaaagtgagctttcatcatcggtagtctgtcgcgagactcgtctgctgactcgcgccttcgctcgtgcgccgcgcaggatgggtggtgtccaggccaagttgtcagagactgaaaagcaggtcgagaaggcgcgcaaggagtcggcgacggcacgcgaggccttcaacacagtccgcaagcagaggtacgccgctcgacagaggctcagcgggtcatcctggtcgagacgtgctgacggccgccgcccgctccacccgacgtaggactgacctcttcaacaaagcctacacgcacatctcggaccggatcgatggcgtctacaagagcttgaccaagggcaatgccgcgccgatgggcggcgtcgcctacctcaaccttgaggacaccgaggtgcgtagcgaatcccggcctctgacgctctgaccgtgactgctgatgactcgacgcgaatccccccccccccgaaggagccttacctggccggcgtcaagtaccatgcgatgccgccgatgaagcgctttcgcgacatggaccagctgtcgggcggagagcagacggttgcggcgctcgccctccttctcgccatccataggtccgtctgccttccttctctccactgcttgatcatctcttgacatcgagcgcgatccctaaccccgtgttccagctaccggcccgcgccattctttgtgctcgacgaggttgatgccgcgctcgacaacaccaacgtcacccgcgtcgcccgctacctgcgcgaccactcgtccgaaacattccagttcctcgtcatctcgctcaaagagtgcgcttgcgttcccttccctcccttccctgacggcctcgccgggcgtccaccctccggtcgtcctcgcgccctccaccccgaggcaaacagccgctgacgcgccgaacgcctccctttcgcagcacgctctacgagcggtccaactcgctcgtcggcgtctaccgtgaccaggacgtcaactcgtcaaaggccctgacgctcgacctgacgcagtacgaggaggggtcgtagcctctgtcgcccgcctagcgctagctccttccccccctccttttgccgctgcctccctctgtaaaaagagatcccgagagcggcggccctcttgctgcggttgctgctgctcggttgttgtacgaatgcccgcctgctcgtaagcccaactcgttccgtagcttgtgtcccggcggtcggtcgcctccttcgggagcagccgcactcgtcggtcgcgcgggcggggcgcggggcgcgggcggagaagcgcatgggctgttcgagccgccgtgccgtgccgtgccgctgctcctccctcgaacctcgaccgccgttagcacgcacctcctcctcctcttccggcggaggttgggatgggcggcgaacgctcgagacgacctgcttgccgccggcccggcccaaatcattctgctgcatccttttcggctcgcacggtggggccgcaggtcgaacgtcaactcggctggcggtgggcttggccttctgatgccgagccgtgcacgacgctcacccttcgacctcggctcgtcgagacatgcatcaacaacctcgttcgacgtcgatggcagcgcgtcggatcggcggttctggtcgacgcgaacccacaaggggcgagcgaacagcacgacgccaacacgtcactcgcccgacctcgcgtggccctcaaccttcttcggccttgtgcgagcgtgccgggcccgcttcgacgtcgacccgggcgagagcttgcaaggcccgagggcgttccttccccgaccccctttgaaggttgggcgacacgcccctggctgacccgcacgggctgacttttgccccgggtcccctccttcaatgcgagcgagacaggcgtcgctgccctgtcgccctctctcatcctccgaaccatcgcccgacaaccttcctctctcgtctatccttctcgtgccccacctgtctctcgcagattatacgccccggaccaggctggccaggtccttcggcagtcttcttgctccgagctcgctgcccctcttatcccaaggggacgcttgcctcttactctcccccgacgctcattcaacacacgcacgctagtgcgtcgcccagctcgctccttgtcctccttccaacttcctcggcctgtccgctgatcactcttcttgcgctcttcatcagccaaagctccgactcgtccaaacctaggtgcgtcgagccgcggccgcgttcggctgctcgattccggtgttcgagctgacgcctgcgcagtcctgcagcccctccctcccttctgtccctttcttcctctcccttcctgccactccctcctcccacaagtccttctcctaaccaaaacggcatgagcagtgctctccaccgcctgtcggtcgccataaagggctcgaatgtcgagcccgagtcgccccgttccgagaccgactcgcccgcgctgagcgaactcatcgcgcggcccgacccgtcctcgcccttctactaccacggcgacagcctagcgtccttcagcttccacggctcgcaggcatcgtcccggggcggctcggccgtctcgccctcaggcgtcaacgacgtctgcccactcgagcgctcggcctcggacgagattccaaagtcacgacgcgacagcgacctcctcatcgccgagaagcggcgcagctcggccatgattgagcagtgggaccgtgacgcggccgcccttgccagcccggtcgccagcccggtcaccagcctgcgcgagttcggcgcgattgcgcccattgcccctccgatgcgcaagaagaactcgcacgtctcgttctcggacgaccacgtccggctccagcggccgtcgctcgcgtcggtcaacttctcccggccgtcgcggtcgtcgtcaacgtcgtcgctctcgcaagagatcttcaacgccgaccaccggcgcaactcctcctttgtccgtggctttggcacgctgccgttcaccggcgatggcggggatgagatccaccctctcgacctcgaggaggaggagcgtcgacgcgagagcgaggaccggcgccggaaccgccaggcgcggcatgcgtcgttccagcgcggcttcactgccttgccgtacgacggcgaggacgccacgcgctcgaactcgcccgaagagcagaaggacaatgccgatcgtgagtgctctcggcctctcatgagtcagttgagacgacgctgaccaaggtcctttctgcctgcaggctttgccgtcatgaccgcgcatctctacacccggagcaagaacctcgagttcttcaagagcgagacgctcacaggcatcggcatcgtctcgatcaggatcaagaagaatgagtaccggtgcgtcgctctcgtcggctccgttgacttcgtcgtgcatttcctgaccctcccctgccccttcgaacacagcacgtactgcgacgtgcacgccgttcccgtcgatgagcgcgaggagctcgccgagcatctcgatgactggaaccagggcgtctcgtcgctgaaccccgaggtcgcgatcaaggtcacgagcaacgtcgtcctcgccatcctttcccggctcgacccggacgcgcttgacatcccgatcgacgccgagacgcgcatccaggtcgtcgagaagatggcccacctcggaaccgcccgcaagcaccagtttgccgcctttgtccggcaagaaggctgccttgtcgcttggtcggacgacatctcgaccctgatcgaggctgtcgaggccctcgaggcccgcttcgtccagtagtgcgttccctggagcgatctcgctcgtttgtcgccgccaagtctcacccattcgccctgtcccttgcgcacgcagcgtctggctctcgtccgctcacaaggacgtcaagcgaccgagctctctccggccgacgctcaagtctgaggacacgatggtcgactcggtgtacgggacgcccggcgtcgagaagctcggctacctcgacggcaccgatctcgagaagggcaacctgaacgcccttgactggtacaaggcgcggccgatgcggctctatgccccgatcttgaccggtgccggtgcgtctgactgtacgctatgcgatgcgagatttgtgctgacgatcatcgtcccgattgcagctctggcgggcaatatcgcctttgttggactcgcgtgcaagacactcatctccgagtacatgcttgacggcaagcctctacgcttcctcctgctcctcacctcgcccttcaccttctgcgtcgccttctttttctgtctcgccctcatctcgtgctgctggacgctgatgggtaaaacccttgcttgccttcaagtccaacctcgcatcgcgctgacctgatctttatccgtcgcaggtccggttgcgcagttcaaccaaaactctgcattctattctggcaaggcgcccgagcgccgtgtcaagcgccggcttcctcacatgacggtcgtcatgcccgtcgtacgttttggcttgctgcgctcaaaggttgctcgctctatcgctgacccctgccctcgtctaccttcgcttcgcagtacaaggagggactcgagggagtcatcgtccctaccatcgactcgctcaaggaggtgcggccgcatcccaccaccctcatcagcgcgtcactgacaagaccccctctctcacaggcgatcatgacatacgagcggcaaggaggaacagcttccatcctcgtctgcgaggacggcatgcagatctgggacgaggagacggccaacatccgcaaggcctactacgactcgcgcgccatcggctgggtcgcccggcccaaacacggccacaagggctttgtggtgcgtccggccgcgcagaccaagatgtctgagatgcgaggctgaccttctagtgacggccctctccagcgcaagggccgcttcaagaaggcgtccaacatgaacttcgcctttgccgtctcgctccggatcgaggagatcatggacgagatgcggccgacgcccaaggtatcgaagaagggcggtgtcgaagagtggtcgtggacggccgaggatgaggacgagctctatgccgaggccatgcagctggcgatcggcgagagttgcggtaccgcctgggccgccggcaacatccggatcggcgagtacatcctcatcatcgactcggacacgcgggtcccgaccgactgcttcctcgacgccgtcaacgagctcgacgacagcccgcaggtcgccatcattcagcatgagtcggacgtcatgatggtctctgtgcgttctctctgtagcctgacgcttcgtccctttgcccgtctgactcgccctcacctactgccccgcttccccagacctcatactttgagggaggaattgcacagtgcgtagcgctcctcgccgacactctccgacgcgccgtttcaagctgacctcttgctccctcgctagcttcacccggcacatcaacaaggccatctcgttctgctgcgccaatggcgaagtcgcgccctttgttggccacaacgcttttatgcgctggtcggccgtccaggactcgtgctttgtcgaccccgacgacggctggaccaagatgtggtctgagtcgcacgtctctgagggtacgtccgcaaggagctcgttcgctcggctccgaggctaatgcttgctctcactccagactttgacatgagtcttcgcgcgcaaatgaagggctacacgactcgctgggttacctactcgaatggcggcttcaaggagggcgtctcgctcacctgcgacaacgagctcgaccggtggcagaaggtgcggccgcccgtcaaaagtcgaccctgttgaaaggcctgctgacttccagccctcctcttgccagtacgcctttggctgctccgagctcatcttctacccgatcaaagactggtggcgccacgggtgcgtcttgctgtttctgctcgaccgacggagcgtgctgctgacctcccaaacttgacctacccctcaacagcattttgaccccgctcttcaagacctttgccaagtccagcatccccatccactccaagctctcggtcctggcctatctgacgagctactgggccatcgccgtcgcggcgctgacatggtgagccgcggcgtcgccgcagagcgtccatcgcagccggctgaccgcgttgcgcccttcaacccaacccagcacactcaactgggtcctcatcggcatctacgagtcgagtctcgacaagttctacctcgagtcgttcaaggtgcgggtcatctgcgcgtccctgtcttgccgtcaccgtcactgatgccaggtcgtcgaccctgcctgcctcccaggttttcctcacctgcgtcgtcgtcttttcgctcttcggaaatctcacaagcgccgtcttcaagtaccggctacgggtcgagggctttggctcggcctttggcgacaacatgaagtggctcctcttctttttcgtcttcttctctggcctgtcgtggcacgttgccgcagccctcgtcgcccacatggtcggctacgacagtgagtctgtcctgagatcctctcgcagtcgagaagcgacgagctgacgcgcctcacactctccagtgcaatggggaagcacgctcaaggaggtcgaaatctcgaactgtgagtcgccgaacgccggctcgaacctgccagcgctcgagaactgacgtcgttttcctctccagtcttccgcgagatcccgctcatcctcaagcgcttctggccggcctacctctttgcgtggtcgctcgtcatcggcatgatcgtcatgtcgctccccttcctgccggacgcaatccgcatcacctcgatgaccgccatcctcccgtcggcgatcatggccggctgccacatcctcgtcagtctctccgaccatctgacgccgtctttcacgatgctgacgcgcttcccctctgacgccgacagtacccgatcgtcctcaacccctacctcatgctgttctccttctgatttatcctctgggacgcctgactcatacttaacttggtctgtaatcgtgtagcaccttctcctctggaacttcctcaccctcccatctcacctagaccttctccaccccgcccgacccgactcacacgcactctcacttgaccaactacccgacactccttcactcgacccgactagagttccctctgcgccgcctctctccatcgcatgttgtcaccttccgctcgcatcgatggaggtaagtagggtcgctccggggctcacatcgaccgccggtctgaaggcagcctcagagcgggcaattcggcgggaggcgcatgatctcacttctcttccgccggccgctgaagggccgtcagctcgggcgcgttccacgtcatgaacgccccggaggagcccgccggcgggcccttgacggcaagcgcaccgagcgcgtagcctgggctagaggtacgcgcagagtagagcagggcgtcagagcacgatctgcagacctgaggaggaacaaggagggcgcactcatccgggttaagaagctcgcccgacgagtggagggcggtgaatttggcgtggtcgctcttcgacatgtgggtcccgcctgtcgaacggatgagcgtttgcatctgtcggggcacgcaagcaagccgtcgtaacggagacagtcaggatgcgcaggttttgagtaagtttgccgggcaatgagagggactgacgcccgtgtcgacgacgccgggccggatcgcgacggtcgtgacatctggctcctcggcgccgagcgtacgcgcgaggctgttcattgctgccttgcccgcgctgtatgctaagcaaagatgacagagcttcagcggcctcgcctcatgcagaagagagagctcttccaggacgaaccgccccaggccgtgtacccgcgctcggccgcgccagaggagacgaggatgatccgccccttggtcgcgcggagatgcggcattgccgcttgaagcgtcgtcaggagcgagaagaagttaatgtcaaagtgctttttgacggcgtcctgaatcacggtaaggcgtcaacgcgggcggtttcaggctgaaggggacggagcagcctaggggacggacgatgtcgacgtcggcgagcttgccgagggggtcgagcacgccggcgttgagaatcacagcttcgagcccaccgaaacgctcaacagccttccctacagcatcgacgctcacgctcttgtcgacgacgtcgccctggacgcagacgagccgctcagggaactcggcggcgagcgcctcaagctcggccgggagcgagcgcgagatcgtcacgaccgacggcggggcccggccggcggcgttgagcgagggcgagcggagaaggagcgtcaggaccgagaggccgagaccgcgcgaggcgcccgtgaggagaatggcaggcatggttgaagattgcgatggccggtcgagaaggacgagctgctccctccgagccgtcggcttccggcgacgggcgcgcgcagccgtcgattcaaccgacccgtcggctggaaaagtcatcgtcggcctcaagacctcttgcatcgagcacgctcgtctactgcagaccagacttattcgaggtagtcctgcctcacccttggctgacaagaggtgatgggagaggcgtcggggcagctgggccgatgcatttctcgagaggtccgactcgccgagcgcaggtcgcgccctcgtccccttgctctcggctcgggagagctgcgacgtcgacgaacgacctcgacaaccaacctccttccttccctccttcctttgcttctagtccgatgtcgacctcccgcccccgtgcctgggacgacgcgacgccgccgtctgccgccgcgccttccgctgccggtccctcggcctcgccctcggccgccgccgcgcccaacatcgaagccgccgagcgcgctggtccatcccttgctctctggccttcggcgtgcgagcatctcgcatccgcccctaccctgtactgacgaaagacccatcgtgctcgcccacccagccgccatcgccgccaagctcggccagtcgcttcgcccatccgcgcccgctggctcaagcgcgagcccgaacgcaggcgcccctcgcccgccgcgcaacgagtttgacggcgagttcacgcacgacatcgaggtgaacgacctccggaaccggtgcgtgcggatcatgagcttgacgacagacggcacatgctcgagactgactgagatatccgtccccttgtgcagatacctgctcacaaaaggctcgacgcaggctcaagtgtgtccctcctcctcggcgcccgcctgcacccgccagttcagtcaagctgacgcctgagggcttcctgcagctgctcgccgacaccggagcgtccgtcgtcacaaagggaacgtggctgcccgacaagtcaaaggcgacggcggccgacccgccgctgtatctgcacgtcgtcgcgcagacgaaggagatcctcgacaaggcgctcgctgccgtgcgttcctgcagctgccatcaacgcgcgatcgacgaccgagctgaccgacccgcatgcttctcgatcgccgcccgcagatccaagtgctgattgaccaggacctcggcgcgctcgtcgaggatcgctcgcagtgggcgcggaaccgcgagcgcttcggccagggcccccccgggaccggcgctaacgctgcggcgcccggtggccagcccggtgggccggttgacaacggattcggccagaggggcgagcggcgcaagtggcccgaagtcaagctgccgatcgaggtggagactattcgcaacttcaacgtccgggcaaaggtcgtcggccccggcggcctgtttgtcaagcacatccagaacgagacgggtacgcgggtccagatcaagggcatcggtagcggcttctacgaacaggagaccggtcgcgaggccaatgagccgatgcacatctcgatctcgtgcgtccctgctcggtgattagcgccgagatttgtcggcgctgacgccttgcttcttcgcccttgcagcggccccgatgaggctatggtcgagaaggccaagctactcggcgaggacctcctgctcgtcgtccggtccgagtttgagaaggcctcggccgcgcacaacgccggccacggcgcgtcatacggcatgccgatgggcggcatgggcatgggcggcccgcccggcgccggctttggcggcggaggctatggcggcccgctacagcaacagcagcagggcggctactatggctaccagcaggcccagcagcccccgcagccgcagggcgatgcgccgccgccgccgcctggtgacgaggcgcctccaccgccgccagacgacggttctgccccgccggcaggcgcgcccccggctggcggagcggcaccggccgctggcgctcctggcggcccgactggacccgagacggctgagcagaaggcctaccgcgagtactgggctgcgttcgtccctctttcgcgttgctcggctcctcaacgcgcaaggctgaccatccattcctcctctcatgctcgacgacagctacggctacgacatcaacgacccggcgttccaggcctggcaggctcagacctactacgctcagcaggcggctgccgcgggcggcgctgcgcccggggctggtgcgcctggcggtcagcagcagcagcagcagcagggctcgcctcctcgcggcggctcgggcgtgtacggcgcagtgtgagtttccctttgtccgggatcctgcggtctcctgcttcgggagcaagactgactaccgctttgcgcttcagcccgcccccggccggcctgtaaacctcggtcggacgtctgcctccctcccttgcaacgcgacgaggctgatgtactggccaggttcaagctggccggtcgctgtaggctcggaggactgtggttatcgtgctctgcttatgtcttctctccccgtgatccggttcggtgcacgcaggctatcgggcgcccacgtctcagcgcagactgcagcgcgtactgcccgactgtccattttgcgctgacgtcttgctcacctgcttccctgcgtcccgaggccgcccaacttccgcaagaggatgctaacctggtcaggatggctactcatttgcttcaagtgccgaggacgtggcggaggcagaggggtgacgagtctcgttgcttccgccgcttacccagcgtgacgacgcggctgtagcaggcagggtcgaaagacgagaggcattgcagcacatgcgggagggtcagactgaagtcgtcgtcgccagaggagaaaggcctttgatcagtttggcgtcgcattgtcgcgtttggacggcccgggctcagggcacgggcgccgaggggacctttgtcgcttgtcgacagagcagacgccgcgaacctcgaacggcgagcgatgtcggtgtgagcggcaaggttcgtccctcgcgagcaggcagaagtgctggccttgcggtgacggcagcattcgaacggcggcagtagcagcaggagccagcagcagcagacggcgcagcaaggccaaggaagaaggaggaggcggaggctcgtgccccggcgagagaatccgccaccgccaggtggtgccacaccaccgacgcgcggggcggggaggtcggcgaaggacccgcccgtctgggtcgagggcttggcttggctcttttgctgctgctgggtgcagcctgcagtgctggccgctgcctgggccaatctagaatgcctttctggtttgatgccgtgtcgggcattggccggccgcctgtcgctttggtccactttggccttgcaagcgcggccgacagccgggcctcgcgcgcaagggcgggggtggcggcggaggcggcctttcgaggcggaatgacatggggaagaaagaggcggatcgacaaggtcgacgtacgacgacgacgacaacgacggacggacggacgacagacgagaacctgcctcaattgctgatactccgaaccgacggcaatccagccgcgaactccggctcgagcgaaccttaatcccctccgaccagcaagcaggcaacagtccctcgtcgctgcccctcctcccaacctcaacgtcttcccgaagctccctgcccccttcgatttcgcatccgcctccgcaccggaaggtctcagacgaacacgcctgactttaggcgagcggggcgtacgcaccgtgagttgtctcgctctcgctgacgagccggctcggcgagcctgacgcggccgcgtcgacgacgggccgggtcgctcaacaaccgctcggggcagacgaccggcccgagctcgggcctcgggcgctgcaatcagggctctgctacctcatccagcagccgatgagaccgacctctcatcgctggacgagcttgtgacaagcaggaggagatgcgacgcgcgacaggtccccctctcgcgccgccaggcggccgccatcgcgtgcctcctcgcgactcgagtcggggcgtcgtcgacgcgccactcagcgcaagcctcaggcggcagctggcccggcttactctctagcagctggcgcacaccgtctcgtcgcctgctaaggggtcgcacgaggggaatgctcggtcctgagctcgtcgaaccttgtgcctgctctggctgacctcgtccctcctgtgcacgaccagcgcgcagcgacaagcgcaagcccctcgacagctaaccctcctcctcctcgacccttgcgcctccctcggttcaatcaatcgatgtacgcctaccacagcccgcactcgtcgtcggccttttcgtcgccggccgacagcttcgcgccctcgccatcgacctcaacgcctccgtcagcccagacgtcgtccttctcgaccttctcaaagtcgctcggccactcgtcctcaaactcgtcgatcgacacgaccggcagcggcgcggctcaatcatcgggcacgtacggcgcgtttgcacgcccagcggcctacccggctggctcgcgagcggcgccggccgcctacccgacgacatactcggccgcccggccctcgccagggatccagccgaccggtccgtcgctcgagtcgctcggcttcacggccgcctacaaccaccactcgtccatcatccgcctccactcgtacacgcccgccttccactcgaccaaccccgagatcaatctcgcccacttcagcccgagcccgccaggcgagctcgaggtcaactgcacacttctcctctcaccgacctcgatgctcgcgagcgcgtcgtcgtcgtcgtcgacctcaaaccagtcggcttacgacccctcgcggccaaagatcatccgcgtctgctttgccggcaagccggtggcgacgtatgtcgcgcgcgcgccggccgagtcgatcgcccatccgccctcggcacccgaggatcaggacttgatcttgagctgcacgatcccgacctgggccgagctcgtcgagtcgggcgcggtcggcggcggcagtgtcgaccggtccgggaccggccgggtcggcctcttctgcgagatcctcgctggcgggccggccggcggcccaccggtcgacgagcacgtcctcgagcgcatctggtttggcgactttgcctttatgatgggcgatgctcagtttgccgagggcggcgccgtcccaatagagggcctcgcgctcggcggctgggccccaggcgacgccggtgcgtactccttgcccctctgacggtcggcggcgaatcagcagccatgtttctgaccggctttcttgcttgcaggcttcctggcaccccctcagcagtcgtactatgtcgacgccggccagaacggcccaccaactctccctgctcggcactcgtggtcgcatccggcgccggtggccccgaacgggccagaggccaagtacacgtacaatgggattgccgccgcccaagagaagagcttcgaagtcaacattaatccgagcgagctccggccgccgacctgtaagtctatttactcggcgcccctcgtcgtctggaagggccttccgagagatgacgccgaaccggcttcgcttgcagacgccttgcaccaagaggtcccgaccagccattctgcgccaccaatgcagcacgctccgccgccgcttgtccgctccatgacgactccaccgttgccgccgccgccgccgccgccgccgccgccgcctccaccttcgctgcagcgggcgactgttactgcgccgcaaccttccgccccgtcgaatccgaccgcaccgccgccgacgaccttctaccggcatgcgatggtcgccgccgcgaccaagctgccgccctcgccgatgaaagctccgcgaacgtcgggcaagtctggctccggccaagcgccgcccataccgccgcttgcgctcccgtctggcaaaaaggcctcgctcaacctccacggcgacctgctagcgatgacgtctggctgggaccaagccgagtggacgagccggcggcggctcgtccagttctggcgcaagctcgaagggtcgacgatccatgcgacatgggcgcccgtcagccaggcaaactatgtcgagaataccatcgtcatctcgtgcatcttccgcgacgagacgaacgagtgctacgtacgtcccgtctttgccgcgtctctcattcctgcccttctcgacggctgataccccgcttggccccgcaggtgacgtcggtcgacgccatttacctccttgaggcgctcgtcggcggccgcttctcagtcgaggagaagaatcggatccggcgcaacctcgagcgctgcaagcccgacacgatgtccaagaccaaggaagagacgcgcgactttttcacgctcatcatgggcttcccgaagccaaagccgcgaaacatcgagaaggacgtcaaggtgtttcggtggacggacctgcctggggcgctcgccaagagcatctcgaaatactcgataacggagggaccgccgaatggcgctatgccgggcctgacgtccatcacgcgcgcgacgggagacgacggcggcgattgagtgccggccgactgtcgcacctagccagccatcttgcacacccctcttatctgcgcttctgcaggacccagattcccccctcccgtctcttcgctcctttcgcctggccctctttctgctttgcacctctcgccctttattgacccgcgcccacatatggtcctgtcttgtcctggcccccccttcctggtctctccctctcgctctctgcacgcctccccgtcattctctctcttgcccgcgtgccccaccttcacaccacctcttgacgacccttgtcctggtctcatcggccccgtccagccgccagcagccagcggcttacactcgatctccatgactatcaccctttagcgacttcgaccctgctccaaccctctcaatcactcgtctcaccccccaaccccccctccgcgtctactcaaagcccaacacctctctgatcttccgcgcgacaatctccgggtcgagctcgatgctgtccgagccgaggtcgggcccccggacgtttgggtgcccgagccaggcgaggggagaaatgagctggttgttttggatggctctgcgtcccccgggggggggggggtgttagttgcaatcgaagctgacacggggagaaggcggacggacagatggttgagcccgaggttctcgctgacgatctgtgacggacggtcggccgacccggcaagcgaggttcagtcagcacctgcgctttagaccacctccagacaaagcaagcaagagaaaaaagagccgacacgcaccgcattgtcccggacgatactctccgtatcaaacatctcgagcacggtcccctcgccggccttcatccaaagcgtcccaaggataaactccaagtcatgcctcgcgccgagcaggatgcgcgtccgcgagaggagagcgaggcgttcggcgagcgtgagggccgggaggttgatcaggtggatctcggcgaggtgggcgagcgagcggagggtggagaggagggaggcatgggaggctgaggagagacgcggggaggtgttctgccgggcgggcgagggtgagcgagagtgtcagcgggactcaagtgcgagcgagcgagcgagttgagagcgggcaagagcagacggaccggccggttccgatcaaagtagacgacgaccggcctctcggcctcgtttggaacgtgcagtccgacaccgagcacgcggtgggcgtttgtcctgtagggagcgaaccagtcggggtgcggcgctgggagggtggcgatggcagagttcatcttgttccattgcgaggtgagggggtgccggtgggcggcgactatgggttggcggcggggagcggtcgatgggacagtcagcttcttcgcccttgccttgcgagtgtccgcagagagagggggaaggaaggagagaggacagacagcggtcgacgacgacgacccgttcaaagacgacggcctggccagccgaggcgagcttggcccactcggcccgcgtacgcagttcgacgtccctcccgagcaggacctcaagcatctcgacgtctgctcgaacagcagtgtggggggagaagagagggacgtcagctgtcgtgccgctgctgctgcgagggagaaggggggcgaggaggggagcaggacggaactcttgccctcggcgtcccgccagccctgatcgcccgagacgtcctcgacgcgcgggatccacacccggcgcggcatcgtcccgatctcgcccgcgctgctctgcgcagaagcgggactcgcaagcgcgagcgctttcagggccgggacgagcacttcggagaggaagtgtctgtgcgtgcgcgcgcgcgcgcgtggaggccgggtcagctcggttggggggcttgtgcgagagaagggagggggaagaggacggacaggtgaggcgtcatgtaacctcctggccctgggccatcgtagaacagcagctggaggcgcgagcgagcgagtgaacgaaggcgagagcggttagccatcttggacgcgcagcggcgagcggcgcgtgcgtgcgtgcgagcgagcgagcgagcgcgagcaagaggcaggaggaaagggggaacggaccgtcgagcccgggataaccctgacgccctcgtccctcccctccaacgcgtcgaaccacgtctcgccgtcgtcgacctgcgcaaagcgtgcctccgggtcttccgagatgacatcggccggctcgacccgcgggccgctgccgctgctcgaggagggcgagggagcgtagacgagcttgccggcggaaaggtagagatgatcaaagacgttgtagccttgaagggcgagggcgtgggacgagggcttgaaggagtgctcgttgggcggtggaggaggcggatggggaacccgcccgcagtcgtgcaactctttctccgactggatgaagaagggaggcccgacccgagcagcaggcagcgaggacggcgacgccaaggcaaagcctgccgctgcctcagctggtgctgcgacggccgctgcgacggctgctacgttcggtggcgagcgatccgaggcggagctgcgcgagatgcgtgccgcctgcccacccgacatcgaagagctcggccggtgtgtcatgcttttgacggtcgccacgaccaagcgctcttcgaggctgactcctttcatcttgcccggtcttctaagagcgacctggaccttccttcacacgacggcgtcggccctcccggccattccctcggcgaccgagcagacggcgctcgcaaacctcttgctggcgctgcccgtcctctacccgtgcccgcactgtcgagccgactttgcctcgtccgtcagcgccgcaggcggcgaggctgccgtccgcgaggccgtcaagagccggtctggcgccgagcgctggctgtgggagcggcacgacgaggtcaaccgcaagctcggcaaggagggcgcgattgggctcgacaaggtccgcgaacgctggcgcgacggcccggccgacggtcggtgcgagatggcatggtaggcgtcccatccccatccccaccccggaagtcaggagaccgcttgagttcactgtatcaacctcacgcttcgggctcggcggcctcagcgaccgcagcctctgccggcgcaggcgtccccgacgcgctctcgtccggcttcggccccttcttctgccgcttgcccgggaactgggcctgcttcgtcgcgacgccaccgttgcgcttgcgccgctcgagctccttgcggctcgcggcgagctcgacctcaacctggcggccgccctcggcgacaagcggcgtctcggtcgggtgcttgggcaggtccgtcagggcctggtagagcgcccattggcttgcgagcagaggggatggcggggccgcgcgctgcttcttggacgccgtctccgggagaggcgctgccggcgggggcgagctcaggctaagcgagggcgaggcgagaagggcggcgagcagagggtgcgaggtcggaagaagctggcccggccgaccgctaccggccgcggggaagctgacaagcgccaggccgacgtccgacggtgaggacgagcgcgtggcgtcgaaggagacgagcagaatcgtctcgcccttcgagccgctcaaagtgggcgggagcggggcaaaagcgagcactgggtggccgacgtcgacggcctcgacgctggacgatgcgctgagaggcaaactggcggtgaggatggcggttgcgctgtgatgtgcgagaagataccgactggtcagcgaagcgatgcggatcggaacgttatgagcagcccaacgcacccgagcgagaagaaagcgacccgaccagggagttcggtgagacccataacggccagcccgaggtcctcctcccgagcaccatcgacggtgcctttcggcgcaggaaccgcgacccggctgtcagcctcgaggtcgatcgtctcctcaacctcgtcgtccggcttggccggggtggcgtcggcggcctcagctcctgtcggagcagcgggaggcaagatcgcccggatgcgcttctgaccccggactgcgatcagagggacgacagcctcggcgacgggcgcctttgcctcgcactctccccgccggacgtcccacacgtagagctcgcggtcgcctccggcgctgacgagccggccctcgttgccgtccgactgcaagacgaggacggacgagatgaatttcgtgtggccgacgaggaagcgctcggcgatcgagccctcgggatagcgcgagatgcggacgtgctcgtcccggtcggacgagacgacaaagccctcgcccggggcgagcgcgagcgacgtcaggggcgaggtgtggccgaggaggagcgtgccgtccgggttgagggacgggtcggccgtcacctcgaatgtcgtccgcttcgtgagcaggtcggaggaggcaggatgcgggtgaagggggtatctgcagagcgaagcaagggtcagtcgacaaggcttgctcaactgcggctcctggtgaccaggacgcacgtataggcatcgccaagcttgtcgccaaagacaatctcattcttcgagttaaatgagagcgccgcaaccttcttaagtaccttcctgtgagaacggaggagagtaaccagtcagcctgctgcgaaggaagggcgttgggcgcgcaggcgcttcaacgcacctgactgagctcagcttgatggccgacgcgtcctcggcgacctcccagacgcggagctccttgccgtcgcagccggtcgcaatccagcgcccgtcggccgagacggccgtcgtccggatgagccagctgtgctggtcggcagccgggagggttgacgtcgacgcgagcggggcaaacgccggcgggctgagcgagtgcaggtgaacgtgcgggcccgaggtgaaggcgaggtaggacgccgacgggatgaccgacaggacctggaacggcggcggcggcggcgtcgaggaggaggaggacgaagaaggagttggctcggccatggcgtctgatgggggtttggaggaggaggaggaggttcgcccgtatcgagtcggtcgacgactggtcgcccggctcggcttcgcgcctcgagattcgctcccgactcgcaagtgcaagttgggagctcgccatccggctcgaccgcagcgcctcctccttctctctcaccctcagcctgtcctctccctgtgcctttcctctcagctctttcacatcctcgcaatggccacgaacatcaccttccaccctggaggtctgtctgagcgttgctctctcgcgtggcaacgacgctgacattgcttccctccgccccgcagccgtcaccgccgaggagcgctcgtcgctgctcggtcagaagggcgcgaccatctggctcaccggtctctcggcctcgggcaaggtccgtccgcgacgaacctggtaatctttcttgctcgccggctgaccggcggccgctctgcgctgcgccccttagtcgaccatcgcgaccgcgctcgagcagcacctgctgcaccttaagctgcacgctttccgcctcgacggcgacaacgtccgcttcggtctcaacaaggtgcgatcttttacaggtctacgctggtctaacatgcaacgcatgagctgcggcgccgagccggcgtagtgtggcttgcgacaacttattcctgagactgagcttcgccctgtcttctccgcaccttgcgcatcgccctgtaggacctcggtttcggccccaaggatcgtgaggagaacattcgccgtatcggcgaggtgcgtccaatcttggatccgccttgttcagagcaatcttcgctcctctgagcaccgcgcaaccttgctgacggattcccacctcgcctgcgcacctgtccaactccctcgttccgcacctccaggtctcgctcctcttctcgcagtcgtcccagatcaccatcaccgccttcatctcgccctacaaggccgaccggcagctcgctcgggccctgcatgaggctgcctcgcccgccgtgccgttcatcgaggtctttgtccaggcgccgttggccgtcgtcgaggcgcgcgacccgaagggcctctacaagaaggctcgggccggtgagatcaaggagttcaccggcatcagcgccccttgtgcgtcggcctccagggcctgccacctatcacccttgagctttccgggctgaccaggacctgctctcttctcgccttcttccgcttcgatagacgaggagcccgacgcggctgagattgtcatcaagacggaggagacctcgatcgagcaggctgttgcgcagatcaccgcctacctgcgcgagcagaagctcatcaactactagatgggcaggcatgggaaggagttgaaccaaaaacacccggatgtcatatcgttcgattgcactggagcatcgttgcagtaggagagtgggtttggacgagtagagacacgagtactgccgtggactctgtcgcacgcagagtgctgctcgaggcaacgacagtctccggcgcttggtcgcatcggctggaatgtttcatccatcttggaacgtctggttgcatgtctgccttcgaagcgagctgcgatgccttgagggatgagttgtgcgcggaagtgcactggccagccgcgcgcttgcgcaggactcgtcgtcgcgtcgtcgaggtctccgttcgcgtcgcttcgacttggcctctctccttcatctgccctgctccccatctccccttcccctctcttggacagcctccgaacgcatctaacagtccaacgcccactcctcctcactgccccatccgaatcccaggcgaccgccgccgagccagcagatgtcgggccacgaggacgtgccgatgagccctccgccgctggcagacacccagctgctggccggagccgctgccgaggaggttgacgacgacgagttcacgctgatggagggcgtctttgatacgcctgccgaggccttttcggaacctgtgcgtcttcttcgttggccgggacggtccggtctgcagtcgggagagcggacgagctgacgcgcgcgctcgggctcccttgcggcctcgtcaggtcgacgtcgacaagatcgcagcctcgctcgcaaagggcaagggcaaggcgacgggcagcgccgtcaagccggcgtcggtcctcgatgacaacctgccgtggtgcgtcgctcttgaccagctctaggctgggcgagctgtcgaggctgaccggttgcggagctcaacatgtgcgcctgtgaccccctccctctcctaccggctcgcctgcgcctgaagggtcgagaagtaccggccagtgacgctcgacgacgttgtctcgcacaaggccatcaccggcacgagtgcgttccctctactcgggcagctcctgctggtcggcagccgcttagctccgccggctcctcggcttaattcccgtgcctccgtccactctcccccccccctccttgcccgccgcagtcgagaagttcatcgaggcacaacggctgccacatctcctcttctacggcccgccagggacgggcaagacgagtacgatcctcgccgtcgcgcggcggatctacggccaggactttaagaagcacatgctcgaggtccgtcggttctcgctctaagcgacgcctgcgctctgcggaaatccctgaccctccctgccctcggcttcttgcagctgaatgcgagcgacgatcgaggtatcgacgtcgtccgggatcagatcaagacgtttgccgagatgcgggtgctcttcaggtgcgtcaggatcaaggcggcgagctcgcctcaaaccgagtgctgacacgtctggcccgtggaattttcacgcacaccacagcaagggcttcaagctcatcatcctcgacgaggccgacatgatgacgaacgccgcccaggcggcgctccgccgaggtaaagcctctctgatccggccgaacgacttgcgcactgactctcgccgcgcccctgccctggccacagtcatcgagcagtacacgaaaaacgtccgcttctgcatcatctgcaattacgtcaacaagattacgccggcgatccagtcgcgctgcacgcgcttccgctttagcccactcccgatcgcagaggtcgacaagcggctcgaggtcgtcatcgagcaggaaaagtaagtctgtccggcgactggcagaggtggccttcgagattggcgccgactgacggttcgtgcttgtgccgcgctcagcgtcaatctgcacccttcagggagggaagcgctcctcaagctctcaaagggcgatatgcggcgagcgctcaacgtcctgcaggtccgtcacgcggccgctcatcaagaggccttcgactcctgctgatctgcgtgcgcgctacttcaggcgtgccacgctgcgttcgacgtcatcgacgagacggccgtctacgcgtgtacgggcaacccccacccggacgacattcgcaaggtgatcgagagcatgatgacgcaggagtttacgacgtcgtacaactgtccgcccccccgcccccgcctgggtctggattgctgtgctgtgctcgtccaattttgctgaccacaattcttcctctcggctcggcctaccagtcgtccagtcgctcaaggccgacaagggcctcgctctccaggacctcgttctcggcgcgtacgactttgtcggcacgctcgacctctcgcccgaagcgcgcgtgtacctgctcgaccagctcgcatcgaccgagtgcgtcgtccgctcctcccagccctcgtcgctcttgctgaccccttcagtgcaatggttcctggcctcgcttaggcaccggctcagtcttggcggcaacgagaagatccagctgactggcctgctcggcggcttcaaggttgcgatggagatcaacgcgaagaaggctaacgcaatgcaggagtgaggcacctcggcaagccgggcagcatcgcatgagcctctatgtttccacggcacggtggacattctatcgaccgggccagcgagcgtctatcgcgtgagccggatgatgttgtacgtcaggcagaaggccatgacgcagacgccgtagatggcgagcgcgagcgcggcccacgtcagccagcgcggggcgccgtcgtccttccggaagagcttgaagtagaagaggcccgggaggatgaaagagatgatggtcgagccggtcgcgccgacaaacgacaggactgacgaggggaccggtcagctcgggtgttgctttcgctcggccggcggaggtaaggggtagaggactcaccggtctcgagctcgtcgaccgtgagggcgaccgccaggccgaccgtgacgatactcgccgtgagcgagacgaagcgtgtgcgacccatctccttaacgcgcttgaccgcgacgccgccgcccgtctcgcccgccgggttcgtgccggccgcatcgggctcgtcgtctgggacgccctcgagctcgacctcgtcggcctgcgagaggagggtcgcgaggatcttgtcgaccgcagcgcgacaagggtgaacttggagcgggtacgaggcgatgaccatgaggacgatgccgagccggccgatggcgacaaacagggacgagtgcgggtacatgacgaggatgttggacgcgacgttggagccgaacgtcaagtactgcgagaagggaagggccactcgggcaatcagctgctgcaggcggcgacgaggcaccgacgcggcgaaaagagacgcacgccagccagagccaggatctcgtagatgacggtcgcgccgccgatcgacgagccgatgacggagttcatgcggcgctgcgtgttgttccgaagctcgttgaaggcggggaaaaggttctggccgcaggtaaaggcaaagacctggactctggagggcgcgcgggtgcagggtcagcgccagacgttttgcgagaccgaggttcggctttgacacgtacggaaacgagccaatggcgccgtggctccagcggaagtactggacggggccggaaggctccatctcaccccggtcgccatgccgctggaagaagtaccagacaacaatcgcgagcatgtagagaatgaagacgagcgcggcctggctcgtgaagcgcagcctggagtcgacctcagaggtcagcttgccggcttgtaacaccgtccgaagcaggtgacgcacgagtcgagccgcttgaagaacgagagtgggatggcgagtgccatcgaagcgagcagccaaaacggccccgaacgaaggatggccggcggcacattgtcgtccgaagtcagcaggttgtagattgtcgtgagcgcgggcggggtcagagtcttgacgatgatgaggtacgagcaagagacgccaaagcactgcattggtcgagcttgatggtcagcacgcgagcgccgggcagggatgtcaggtcgctgaccttgatggcaatcgccgcgtcaaagaagacggtcgccgcgggcccaaacgtcatgagagagacggcgttgaagctgctcgctcggagcggccgcacctcggcagcgcagactgagaggaggtagaggccgaatcctgcggtgaagccggatgtcgcacctgggaggtgagaggtcgacttgggtgagtgaccgattcagaagcgcgcatggcgccgagggttcgacaagctgaggcacgcacaagagatcattcctgggacgatgccaacctgcgagaaagcgtacgggaacgccagcatcccggtgccctgtaatcgcaagagaggatcaggtcaggttcatggcgggtgcgctgggcacaacagggaagcacgcacgaggatcgtgttcgcgaggctgagagccgaagcgtcacgtcagccggtcctgtcaggcgcagacggtgagtcaggtagaacctgcagcgactcactttgagacggccgagaagatggtcgcgctgccaccctcgtagatgtcgagatcgtcttcagccccgttggcgatcggtccatggtcgctctggcggacagcgtcctcgagcagcggcgagctggccgacgtccgggctgaggacgacggaccaaacacggcactcgccttctttggcgaaggaggcacagcagcgtatgacatggacttgcgagccggcgggacagctggagaggcgctgcaaacgagagagagaggttagaggtcaagaggcgaccgaccgacagtccctccgagctcaccgacgcgcgccgcgcctgtcggcctgctccgccgcgggcgcgtgggtccgtccgaggtcgagctcggcaacgagtcaagctggccaggggctgacttgatcaagagatggcgcttgggcttcttcctatcctgctgcaattgtactgctgacctggtgagaacgatgggacggcgctcggagctgtctgtcgtgccgacccgaagcgtggctcagccgctgcgagctggtcgggggtgtccaccccattctctcaaaacataccgcatgaggtggctgctctgctctgccaacacagagcccgttcctagctcctgctgtccatttaaagtggtctgaaaactacgagaagcgagcgttgccggcaacgcatgctcgctgaggtgcgctgcgcctgatgccgttgaccgcgcgccggaaaccccgcctcctctaccccctgcaacgtcgaccgagccaccagcagccccctctcaaaccccatggttgccgtcggccacctcttgctgtactcgcccttgctgcctccggctcagctcaccaaaccgagcggcgaaaaggatgaggacgcgcacgaggctgctcaggtcgccttctactcgtcgagcgccaacgtcgtcggcacccgggatggcatgctccggagcctcggcctcgccaagggcctcgaaaactttgtcgtgtgagctctaactatggctgagtggcagcgaaactcagggctgcatgctgaccccgaatgaaccgctctcgacagcatgatctctccagctcagccggcggatcggcccgacggcggcgagatcgtagacgacgacgggacgacgatcgtcacctcgacgagctcgacgatgcttacgctctcgctcgaggcctccttccggctccatatccgcttcacaatctctcctgagccagctcaggccgaacccggcgcctcggcgaaccctttgccgccgatgtcagctctcaaggccgttgtccagcaagcgtgcgagcggttctacctcttgcacggcccgctctctggccttctcccagcctgctctgctgaggatgagccagagacagtcgtgctttctaggctcaagcttcggtcggcggtcgagcgcttctggagcgagtggatcgagcgcttcgccgcccgcgcgtcgtccctcatggccgactcgcacggcctcgccctgcctcccatcatcctcgcgccgaccgggaccgagaatatgctcgcgccaccatacgccgtgctgtcttcaaccaacataacggcatcaccttcgaagcaactccccgtcgagctcctgcatcatctgctctcactcgtcccggtgccggcgagcccaagatcggtcactgagccgcagtatggcgggctggggacacgaaaggacgccaagtcgaccggagatactgtagctggcagctggtgggatggcttcggcggtctcggcacaggcatgtcgagtctgacgctcggccttgggaagagcaacggcgcggcgacccgccctgcccctccgccgccgccgacaccgtcgacggcccaagcggacacgggccgcaagggctctcttgcttcctcctcgctctggagaaaggcaacggtcgacctgctgtcgtttgggtcctctacaccttcaacgcctgcccatctgccgcctcgcccgcacgactctgaagctacagccgcaacggcggtcagcccgacatcgaactcgacagcgtctgcgactccagctttggaccacccatcaagtcacaagccgctagacggtgccgtcgacacgtcgacgttgaaggaggccatggagcaggatctgcctctgccagaaccgacgacgctgaggtggtcggaagtaccagtttggctgaaggaggtcgacgagagaaggatgtgtagagtcgcaacgactttggtgcgcccgttggcctctgtcgttcctcgccgaaagtcgctgatctattcatcgcttcgtcagctgcctgagaacacgtcgtctgccctcgccgggaaactcttcgcctacttacctccctcggtcagcccctgccagcacccgtcgctcgaggtgatcaaagctgctctcgatcccaccaaagcgccgaggccgttgaccattgagaccccggtctcgaacggacttctttcagaaggctcggttgaccaccgttctttcgcgacaacgccaacgaagccgacgctgtcccgctcaccctcggccgtctcactcctgtcgaccttttcgacaccgccgcgtcccgcttcggcgggaccgagtcctctaaaaaacgcgcccgtctcggcactcgtccggctcgacggcggcgaggctctaatgaatgggccctggcgacacaagggcggacgaggaagtcgaagggagcgctcggtcgttcgcgggctggaccttctgcacgggttcgtctcgcactctttgtttctttgacttcatcctgacgactcccgtgcgcgtcacaggcccgacatcaaggaggccgtcacgcgtacctcgctcgcctcgacgtggatcgccgcgagacgcaccacatcgagttcagcagatggcgaacttgtcacactcgtcgagtccaagggaatcagtctaggcgacgtcacccgtcagtcctagctttacctcccctgtcacatggagcgaacgctgacgctcagcatgctctcttgattctccgttcaggcttcagtcggcaagctgagcgagagtttgagcgccagctggcctcacgggaggcagagagagggcgatagatctcatgtggtagcatctcatgtattgaatctggcaccgggtcatgttgccggcggtcgtcgtcaggaggaggaggaggagaccgaccgggcctgctgcgccgtcgctgaacgagctcgctgcgccggcagcgtcgtcggttcgagccgggccgtcttcgcgggcttgatgaccacaactaccagggcgaagctgtctaataagcaatagattgctacagaccgaacggccgcccatctcatacctcattcggtccctgcctgaggtaagcacgacggccagttcttgagctcgctcgcctgcagcacgacttcggcgctgaccgaacctcgtctcctgttgcagtccttcttcagctcgcatagagctcactgatcaaggtgtaggtcgactgtcaagatggacgagctggaagagggtcgctctgacgggacacctatctcgttgcgaagcagcagcattaacagcacacctcaaagccgcagccgagcgggccgtctggccttcctctgaagctgccatgccgccggcctggaggacgtctcccgaggccagacgtgtcttgaccgaagcaatcttctcgaccctcccaatcgactcgatccccctctcctctctcggcgcaacgaccgatgatctactagcggcgcttgccgagaggctagccgggcggctgaaccggcatccctcggcgttcaagctgcgaccggccgacacgctcggcggcctcctcgaggcggtcagcgaccttctggacgactcgatcagcacaatcgccgagaaagacgagccggctgccctcgaatggccggccctggcaagggccaacgttacggcgctcgtctcgtgtcttcctccgcctcagccagacctcagtacccggccttcgtacgaccggcacgtcttactctctggtgcgacctctgcaatcgggtgcgcgctgctcgagattctgatggcggacgatgccatcgacaaagtgacgtgtttggtctccgagtcgacggacgaacgtgcgatggccagtctcctacaacatctcaacctcagcggatacgacgtccctcgcttttttgcagcgggcgttgaactcgaggtccttgcgtgcgacgtgaaggcaccgggctggggactcaggccaggtgacgaggagcgtctggccggcggcgtgatcgatgtcgtcgcggccggctggcaatcggatgcccacgagtcgcttgcggggtatgaggtgacatgcgtacgacgtgcgtgcgactgcgaccgactctcgtgtacgctgatgcaagagttctctgtgctgacctctcacatgactcgaaatcggcagcgaccctttctctgctcaacttttgcgctaatggccggcgcaagacgttccactggctcacgacggctcgaatctacgacggcccgcctttgccgagcgcatacgcagcgcccctcgactgggcgtcctccgacgcaaccgttgccggatctagcccctttgtgcggtcgcagtggctgatggaggtaagacacgtctctctttcacgccttgctccagccactggactgacccagatgcctgcctcggttggcaggctgctctgcatgagatcgcgctgtccgaccacccggtgccgatcattgtccatcgagtcggcgacctgtcggctcactcacgcaccggtcactggagcccgggcgctgccatccctcgcatgcttcgaaccggcaagaggaccgtctacttgccccggattgggggcttttcccccgcttggcagccgcctgacctcgtcgccagagagatcaagaagaagctcctggacgaggctgagagctcttggacgaacggtagtgtcatcgatcatcggcgaccggacctggcgaccgactgggacgactacctcgaggtcatcctgcagctcggcttctgctctgacctcgaaagcgggtcgatcggaagatgggccatccatgcgaaggaggtcggcgaccccatgacaccgctgccggcgatcagcgtcctcaaagaactccagtcgctcgagacgttcgccgcgacttggcctcactctggcacgcccgcggccggtcgctcgcgagccgagatcacggacgaggtgcgcgcctggtttcgcgtgtgggccgacgacgattgagaagctcgaggcggagagtacgtaaaaaaatcatgtcattgcggtcgggaggtcgtcgactgggcgggaaccattagaagaagagggagggaagatatttgtgcgcgctcgtgagagggagacgtcaggacaggttgcgtaggggagtcggggtcgggcaggtgcgggaaaggaaaggctaagtacggcgcccaacgccggggcgcgtcgttttgagagagcttgcagaggcaggagagtaagtagatgcttgcggaggttgacgagtgaagagatgatggagaagggccggcgggaagggtatcaggtggattttgtaccgtccggtgatcgagaagagcggtcgagatgggtcgaaggttccgaggagctcagtcgtgaccaaaggcgaggccagagtagagcccctcctcgcgcgcgaggaggccctcgccgaggaggacctccatcttgcgcgaatggaagccgatcgtgctgtcgaccttgccgtccgagtcggacagcatgcagaggtaccgccgccaagggtgcgtcggcgggatctggccgcgccgccactggggtgcctcctcggacggcgggaagggcggccgcttgttgatgtcggtcaaactggacgaagcccagccggacgaagtgtcgacaagcctagagcgggtcaaacagagtcagcgatcgaacgaagcagagctggacacaaggacgtaccagccgcggttgccgtttgaccggatgacgcgccaggccgcgcccttagccttggcaaggttcttgagcagcggtgcggccagctcgatgacgcgcagccggcccggcggcggcggcggagggttggcaagatcgaaccagatcgggctcgaggtgagcgggttgatgaggagcgagtagacgacgaccatgccagcggccgagttggccggccgggtgatctcgggcgtcgagttggttagggtaaggatctcaatctggggcgccttgtccttgataaaggccgttaggtcgcgcagcggcagaagcggaatgtgcgacaggccgagcgaaacgagctgcggctgggcctggaggagcgcgaggtgcgacgcattgatgggcgacgacgacatgtcgaggtaccgcagtttcttggacgtgaaggcgggcgaaagctcaaagatggtcgtgacgtcggcggccgagagcggcgacggaaacgacatcgaaccgtagaggttgagctggcggagatgcgaccgactggggtggagcaggaacctggcaggaaggcgatgacaggtcaatggaaggcttcctgggcggggcagacaggccagtaaaggacgcactgagtaatgtcggctccagtgagcttggtgcagcgggcaagactgagactccgcagcttgatcgcgtggatctcctcgagactcgagatgcgcgtgtacgacaggtcgaggtgcgtcaagttggcgcagcacgagatgatggcggtcaggtcgtaggccgagatgaacttgcacgagtgcaggcagaggcgctcgatcgaaaactcgatgcggtcggcgaccggctggtagtcgggcaggtagaagccgctctcgccatggtcctcaacctgctcgggccggataaaggtcgcgacgaacgtccggagggccgtctggaagacgcgcgagttgacgccggtgaggtcgagggcgatgagcggccggaaaaagacgaggtgctcccactcgtccgactctcggaggaacaccggcagctgtggcacgccccgaaagaagagcgagatgaggttggcgaggttgagcgccgaatccatgctaaagaggcgagcggtgcttgggtcagcgaggcccgcatacttcaatcagcgaagggacgtactactcagtcgcgccaaatgcctcgaggttgccgagacccttcagcacgagaccgagccggtcggccgtgacgaaacggccagtaaggccctcgtcgagactgcgctggaggccggtcgtccggaacttgtcgaagctcagcagccgggtcggcaggccggcctcattgagcgaatagaggaactgggccatgtcgggatgctcctcgtcgtcgtactcggtcggcgcgtagacggtcgatggcggcgcaggccactcaaaggccgactcggcggtgtccacccctggcgagaacgggtacgagatgtgcagtggctcgtacgtcgtcgggatgggcgggaccactgaaggaaagagtgcggtgggagatcagtcagtcaaaccgaagagcaggggaaggaaggaagggtcggcgactgacgtggcgtaactggaagctcgtcgaccgtgagcgagtcgatactcatgccgcgctcgccgatgccagggaagtcgccgcggaccctgctccgaccgatccgctcggggctctgggtcatccgcctcgcgttgccgccgacgctgtcgcctcgcctgagcgcgggcgggatggcgctcccgcgagaaggtgaccgctcgagccggcgcgaagggccctcggcaaactcgtatctggcggcctggagtcggtcgggcgatgagtcgggcgagcccgtcaggcctgctggcgagcggaatgatgccgaggccgtctcgagcccggccagctgggcactgatgaaggccgaggtacgctcgatcgactgggagcgggtccgttggagaccgaggacctgcaagctgtcgccgccgttgatcccgctgctgctgccaccaccaccgttcgtggccaccttcgcgtttccggccggcccgttgacgttctcgagcgccgccgcaaggccagcgttggcgagcacggccggcgtcagcgggccgttagacgtgcccgaggacgtcctgttgggcgaaacggcgcgcgagacggggacagagccttcggcaaacgtctcaccgccggaggcaacgcgaatgcccggctgctcgccgccgagcttgtggacgacgccgacccagccacgggggcgcgagatgcggagcagccgccagagccaagggcgcgaggtgtagtagaactctgcgaaaggttggtaaagaggagaagggagagcagggtcggatttgatttcgaccatagttgggttgggttcgcgtgggcgaagaagttgaggacgcaaggtcagctgagggagactcctttgttggccggcaccgtccttgaatggcaccgcaggcacgttcttgggcagccgctgctggatgttcacgtacccttggagacgagcgcgagagcgagaagcgaggtccggacgtcgtcttcgtctgacgagcctggccgagggtcgagcaaggggtacttgggcgctcgcgggagggcacgcgagaagatgatctggcacaggggcgagatggcctggagcgggaaggacggcgcgtcgctgggtccgtcggccatcgaacgggagagttggcggcgggggtaacggagtgagatgcggttggacgagaggggacgggcaaggggttggcggcggtcgatgctcgaaggaagaaagccaaacggagaagaaggggcgaggccggaggcagagagacacgcccgccgccgccgctgccgggcagtttcgtctgtctgtcggccgggctcgcccgcgcagagaggctcggccgaagggggagacggtcgaccatctctcgctcaactgtatgccgccatgatctcgctgaccgacgagcaggcgctcctctttgcgcgcttcgaggctcacgatttcgagaccgaggacttccaggtgcgatcagggcctgacctgaggctgggtccgactgctggcagctgatcctctctctcctccgaacgctaggctgtggccacgcctctcctcaacaagctcgagctcgctggcgcgctaccggctgaccagcgcgagtcggtcctcttgagggcgaaggcacagtactactcaaggtgcgccttgtctgtcgcccgcttgataacttggaggctgaccctcagccgccgcgctcgttccaacttgtcaggacagtcgagcccttctcgctcgaggcctacaaggcccatctcgcgctctcccaacccgagccaaagcagtctcgcgtgccgcacgcggccccagcacgatccctcctgccgacgctcactgcagccgcggctaccgacgttgccaaggacggcaccctgccggcaccgcgggcgccgcagggcttcgctcagatcggagcgctcatcgctgctggtcgaggaggcgagctcgtcggcgacgacgtcgacgatgtgacggtacacccgaaggcggccgccgtccgtcttgctctgctctggcgcgatgtgcctgagactgacatcgcaacccccccgtgacctgtataggccatgtgcgcttcggctgaggtcgcgcaagccgcgcccaagccgtgggagagagcgtctgcggctcctggatcgtagaaagttgagagagcgatgtgcctttgcaaccgagtcccctcttgactgagcgcaaaagaccatcgatcgtgaactaatggaccaggcgaagggcaaccacaacgaagcttggctgcaagcccacgaagaaactgcgacgaggatgcctggccgggcgagaggcgagttgctgcgccagtccggtgcttcttcgctgctgtcgcgacatgcagcgcggttcggccgagcggcattcgagccggcgtgagagcggaaggtagccgagaccaggcaagcggcgatcaagtgcgagcaaatggccgtagcgctcagccaggagtgcctggacgagcagatgaggaccgaggcggttagctttggcgtgacgggtattcgcggtcaggtacgtcaggactcacgagcccttggtcgtcctctccatcacttctccgctgcagaggccgccgatcttgctgcaacctccggtatggtcagcagctcgccgtccttgtactgaattccggcgaagcggcccatgccgatgatagtcgcgcctgcgagcgtcgtcgtgcggccgtggggtcagcacacgcgttcgcctatgagctcgccaacggagcaggcccagagacgacgcaccgacgccaaagaaggccatgatcgccagaccgcgcttcgtcggccctcccgggacgggcggcgttcctgcggcagcggccctgctaagcactttgccttgcgtgatggcctggccgatgccgtaacctccgagcgctgtgagcgtcaggccgccaatgacgcggcatgagacgcagtcctcgaccggctttggcgtcgtcggcgggttgagcgtgtcgaggatgttggacatgagcgctgtattaacgagatcgacgtcaggacctcaggtagtgcggggacggggccgaagctctcgaggtccgtcggcggagggccgctcggtcgccccttacgcccaccttctttcgagctccctccttcttccagtaccttagagctcaatcagacagcccaaagcagattgcaggcagctttttctctctttctctcgggcagccaccgcgcggagcctggtagcgaccgaggaccatggtcgtaggtcccgtcatgcgaagctcggcctcggcctgcgcctgccttcctcccgctcgcccgagctgaccggcgatttgctgctgcctcgccgccgtcctagctcatcaacgaggtgcgtcctgtcctaacctactgagctgagggccgtgactgacgcagtcatcgctcgtccagaccaagtacgcttggtgagttgtgccggggggctgagcagctgcgggcgagaggcccgggcggcctacttagactgacgatgtccttccctccttcctcttcggcctttttcagccaggcctgcatcaagggccaccgatcttcatcgtgcctgcatcacgaccgtctgtcactcctctggccacatgccgtgcagttggagccggctcgactgacgctctgtacttgcttccgacgactctgtacccctctcgcgctaaacctcgcaggcccgctcttcgtacgtcgatccgaccggctctgaccgctgcaagccttctctgactagagctctctcgtgttggtcacacaggaggtcgcaaagaagggccggccggtcaagcagtgcgagcattgccgggagctccgcaagtcgaaggccgttcacgtcaagtgcctgtgcgcgacgccgcctccgaagccgacactatccgaggccggtccgtccagtgagtcgctgcacttattgagaggccggggtagacttctcactgacgacgttgcccacttccgcagccggcaagcctaagtcgcggcgcaaagacccgacgctcggcgcaccggcccttccgaacggcctgcgagatattcacgacatgagcctcgcggccgaagttctcaatgacctcagcagcggctcatcatcgagcaagcagcgaggtgcgctctcatgggctcgtgcgctgtggcagattgaagcatgcgtgtcgctgatcagccatgacctctcgcggcaacgactgcagtcgatgacctgctcaacccctgcgcttgcctgaccggtggctcgtgtacctgctgtgctccacgcaaaaagccagcgccagtcgctccttcgccgccgaccgtgccctcgccggcccaccctcggtctgtcgctgagtcgctggtggacggacccgccgaggcagagcggccgaccctctcccggtcgaactcgtcgtccggtcggccatctagacggacctcgatctcgggctcgcatggcggccacaagacgccgctctacagcccgtatccggtgccgacttttaacgcctcgggctcgcgcatctcgatccgcagctcggtcacgccaggcccgtcagcgggcgcgacgacgccggaggccgtcctccggcagggcctcaaagacctcgtgggaaactacatgagggcaaagcaggaccgcgtccagaatgcgctcgtcaacttttccatctcgaccggccagggcacgggctccgagaccggcatcgagcgcggtgcagccgagcaggtcgaggagatcctcatggtctcaacatgtacgtgcggcgacgactgcacctgcccgagctgcaaggagcatggcaacgcgccggtcgatggcatcgacacagaccagcacggctgcggcgacaattgcagctcgtcagtccgaccctcgggaagatcgttctgtcgctgagggcccgccctgactctggctcttctttcgcgcctcggcaggtgcttcgcttgcagctcgcacgtcgctatgccggccaacctctcgaccaaagcggccatgcagaccgtctctgaactgctggcctcgagctcggccctgctgcctccgccgcccctctcgacccgcccttacgacctcgacccgcacagcctgagtgtcctgccaaggagtgcctttctcggcggtgacgagagtcgggcggcctttgggctgatgcaagtcccgaagctcgagtgctgctttggccgctgccggtgtcctccgggcgagtgcacctgcatgtccgactgctgcggctgcgtatgtctggcttgcctgtctagttttggagcaggaacgacgacgctgactcaagtcttgttacagtgcgacaagtgtctctgcgacgacgatgacgaggccgctcccagtggctccggtagctgggttccggtaacgacggtcgtcgaggcaccctctgcgccaaagccaacgcctgccagcagctgctgcaatagcgcaaagaaggaggtcatcgagatcgatattccggttttcgctgctgagccggcggccgcacccgcccgcagctcgtgttgcgcccccgcgccgccggcaccaggcccggccaagaagtcgtgctgtgctcctccagcgcccggcacgtcagccacggcggcaggcaagaagaaggcttgcgggagcgaaggatgtggcggcaagtctgcgcagccctcacagccgaggcttcgaccactcctgccgaagccgccggccgtcgagcagctggcgttctcccgagcttcatcgtcgcgcgccggacccggcccatcagagtccagcagaagccttcaaccatcggcggacgtcggagccccgcccgagaacccctcgttcggcgagacgatggctggccagccgctatcgcccgacttcctggccgccctgttcggccagagcccaggcgcaggactaccctcgcccggctttggccgcttcgacggttacactccagcttacgacgccggtccgaccatgccggccatctctgacgacgacctcgacgagatgatggcgactttggcggccgcaaacggcggccgcctcgctgggctcgactgggaggcgacgcctggcgccccgataccgagcttcggcttcgattcgacggcgggcgtcgagcctggtccatatcagaccgatcaggtcttcggcacctacccgtcctattcgttcccggagccgcagccctcgagctacactctgcagcggcccgcaacggacgacccgccgttcgacctccgcgcttttgtcgactcttttgcgacctcacctcaaccgtcacagccaaaccccgttgggccctcgccgtccgctggcacggacgatactgcccacggctccctcttcatgcccgcaggcatgcccgcctactccgactttgatatgccggaccctgcgctgctcgcctcggctggcgttgactggaacgccctgttggccgagtccccgcccctctgacggggccaccgtcggtcgccccttcccaaaatcctgcacaccaccactccttcatctgcaacgacttgaacgaccctcattcctttgttacgaccgtcgtcttcctgcgatgacttccccgacgagattcggccgagccggcagcgtgctgcgcgcccttgcgtctgcggcgacctcgctcgctctagcttaggccacttccggcctttccaaagctctgctcaccggctctctctcttgaaggtcctttccgaggatccagagtgaaggacagcctcgagcgtcaggcatcgtgaaagatgcagtcgggcagctgcaacgcccttgccgctagccgcctcgtcgctccgtcgcacgcgccgcgccctctgcgaccctcgaccacgaccggcctccgactgtcagccttcctcacacggcctcggttcgtcagacgcttgcccaccatgtctgttcgggcgcctgaacgcggcggctacacgaccaacgtcttcatcctcgactgctcggcgtcgatggccggcgtcgtgcccgaccctgagctcgaccgcgacgccgcgtcgctcgccgccagcggaccgaccgccatctttggcgagacgggcagcccgccggtgatgaagagcaagctgcagtgggcaaaggagtatgtctcgcgcaagatcatcgagcaggtgcggcccttcttgactagcggtccgccgtggtggcaagcctggctgagcttgagctgaccccaagcgcgcacctatcccttgatcgcctgactctgctccagacgtcgtacggccgcaagacagagcattgtctggttgttgcgaccggcgaccgtgagctccctctcggctcccacatctctgtcgagctaaactgcagatcgctgatgcacctcctctgcggctcgcctcggcgtttctcccccgtcgcacgcgcgcaggcaccaataacgcgtacgatggctacgacggcatcgatgttgtctttccatcgcacatgtcttgtgtgtgattcgtggcgagccatctgcctatgcgattcgccgactgatccattgatgaccgcctctctccttggtagccgcgtggatgatcggccaggtgcagaacgtgaaggcaggcgccggccccggcgatggtaagtctgcgccgcctcgctatcgcttgtctcacaacaggactgacgctcgccaatctcgtctacgttatagtcttcgctggcatgtctatcgcgctctcaaccctgcaggattcgccgcacgagatgaagaagccgagctggacgaccaactttcacatcttaaccgacggtacgcccccctctctcgcggcgccggtgccgagcagcgctcatcagttcctctttctgacgcaggccagagccagctgcaggatgcggacgttcagattaagagcctcgtccccggtctccgcttcttcaacaacaagacgctcctcatcatgtaaggccggtcgctttctgctcccctgtcccaacgccgccgacccttgctctttgcttgacgctttacagaggctacggcttccaggacaaaaagtgggaacggctcggcggcacatttccgacagcggccgacccggagcttctcgtgaatcccgatgcgtctccgctcctaagtgaaaggccagacgagtctaacaccgcgccttattcgtcgacgaccccagaatgagaacgaggcgatcctccgcggcttcgctcgcacgtgtcgcgcccaggccaactgcgccgacagcggcaccatctcgctctcgctcgccctcacctttgtccgcgcaccccagctgcggaccgtcaagccgacagccaaggccatgccgctcaggattgctgtcgacgtctttgccgaccgcgactcggcttcaggccacaagtcgctgactatcccggtcaaggtcgccaagatgacggacgccagcacggccctcaagaagccaaagacaaagcccatctatgtcacgcccgcccagcctgcgtctcccgagcgagagtctgcaagtctggccaggcgaggcaccgatgacaaccgcaaggcgcaggagacactcaagacggcgctcatcgacagcggcgtcgacatcggtgacggtctcgagggccctgcgctcgtccacgagctcgagcagcgcggcggcgagggcctcaaagccttcagccaggagcaggtgtcgctttttgagcggctccggagcctcgcagtccccgaccacgtcgcgtcggccggcgagccgaagctctggaacgttgttgcgacggatctgcaggcgacccacgtctatacgggacggacggccgagacagtggcggacaagtcgacagctgacgccgccgccgcagccgcaggcatggccgagccagagcctgtcctgcccgaagacgtctcgcgagggcatcgtttcggcagcggatggatcccggtcgagactgacgccgagacgaacaagccggtcaagatgggcgccttccagacggagatgggcatcgacgtctgcaaattcatcccggcttcctctgcgagtcctcttctcttgacccctcgagtgcggacgcctggctgaccggcctgggctgatttacttttcagtttgaccgcgagcttgagatgggcgagctccgctacatctttgcggatccaaagtcggcaaagtcgcagattgagctctcggccctgatccgggcgatggtcgaccacccttcgggtcagatgttcgccgtcatgcgctacgtccacatcaacgactctgccccgttcatggtcgtcgcccggggcgtcaaggacgacaacggcggcgaccacctcgagtgtgttcgggtacgtcctaaagcagcgcaagcgatcttatatgacgaaggtcctgacgccgcttgcttcctcatcgtgcaggtcccgtttcaagacgactaccggcgcaactacttcccttcgctcgagttccccaagaatgaccagggtgatctcgtcaccgatcactcgacactgcccaccagcgagcagaagcgtgtgatgggcgcgctgatcgacaagtcgatcctcaacacgctcggcgagaacgggtgcgctcgctcgagaaagctcttatcttcgccagacatcgcgctgatcttgcgacctcactcacgatgccgcagcaccccttggtttacgcctgagctctcgtacagcccgatgattcacacgctcaaggctttccagcagcatcaggctctcgccagcccgagcgatcctccgccggcaatgcactcgtacctcacccgctacctcaagccgccggccgaggtgatcgaggcgacaaagggtcttggcaagcgtgttgcagacgcatttgatctccggccaggtacgccaacgctgttaagcctttcggcttgattgtgagacgctgacgagagaaccgcctcgacagttcccaccaagaaggcgtcgaaacgcaaggacaacgccgctgtggccgaagaggagtgcgtcgccgcctttcgacagctggcaacgacgcgacgtgctaatcctcaatcatcagcccgatcgacatctttgagcttttcgggccgacttcgttcgtgtcggcaaaggacgctagccctcccggctcgccgacaccgagcagaggcaacattccctcgaaagctggcgacgagtcggtcaccgagtctgaaacggagcctgagccggccgacagctcgcgcttgatcaagcgagccgacaaggtgcttggcgtctttcaagaggcctgggcgacgggcgacggcgccggagacacggtcgaaactggtacatgcaagctacggcgcgcgcataggcttcctcgctgacatgagagcttccgaccgcgcgaacgcagccatcgagacgctcggcaaggacatcctcaacctagtcgataagggctcgaaggaccaggctctgcgctgcatcacggcgatgcgacgcgagtgtctgcaaggcgaggaagcgcctgcgttcaacaggtacgtccttgcgaccgctgctccctcaacaaagtccttttgaaatcgagcctgtcgccgccaatcctcagctttatgtactcgctcaaagatcacgctcgctcgaatggggccaccgacttttggtccttctttcaggccaaaggcggccggaaggcaggcctcctgaccttcaaggacgatgccgagtttgagctgagcgccgtgacgcccaaggaggctgatgaggtgcgcagtctgccgctctggtcggactgaatctgccggctgaccgatgccgtgcccctgcagttcctgcgcgatctctgagcgcctccagctctgtctcgcttccctgacgaccctaacgacccgtcgatgaatgacgcctgtctgagaacgggcgcggtgcaaaggtttcgtcgtgcaacagtaatctcttcggcctggagctcgtgccggtcactcgtcgacatcgtcctcggtcggcttcggcttccgcttcttgcccttactggcagcggtccctgactcgacctcctcgctcgacggtgacctcgcatcgtcctctgtcttgatcggcttgctcttcttgccctccactgcgaggacaggagagcgcgcacgagaaggtcagcgcccacctcggtcgccggcgtcgccgacgtagccataaagaggctcgtaccatcgatgtcgaacagaaagtcgtaggctggaatcaagaggcgagcatgtcagcgaggtgtcggctgcagcctcatccgcgcgcttgtcgagcgcaccgtccgagcccgagacggccttggcgatgtcgcctcgttgaagcgtcttgcgcttgcccgactcggcaatcagatacgaccgacacgtcagctcggcgataaatactgtgcgatggcccaggcacggaacgcgatcaacatggtgctcttgagcaggcgctcgattgcagagggccgtacgttcgcacgcgcgcgagaagatgagcggcgctgcgcggagcggaggggttgagcgacagcctggtcagtatggatcgagaaggacggcgctaaggcgtcgaaagccggcgcaccttctgcagagatcatctagcaggggcgaggagcagtggccgtcgcgcgtcagtcgggaggcggatgctgcggagcaagggggggcgacccggaggagctggcgagaggtcgggcaggcggaccttcacgtcctcgtccatcttcatgaccttcttgatgcgcgcgagaggcagggtatgcgacttgaagtcaggcgtctcctgctcatagacctccatgcctgcaggggggggggcaatcgagtccgggatcagctgctatgcgagcagcggaggaggggccagccttcgggaggagggccgggagctctcgccgacctcggcggccagagacgcacgcgattgccagaactcctcgaggaactgaaggcgtttctcgagttcagtcgctgagaaccatgtgcccggtgagaaacgggatccgcacctcgtccaggctctgattgggcttgacgagcggcgtcggcgtcagcttcgcgcctgccttcgaggacgacgggcaggcggcggcaaaggtcgagggtgtctggcagcaagcccgagtagccgtcgggtcagggccatgttcgcatccggtacacacacagagtacgcactgccatctcgcgacgaggagcgggggtggctaggatgtcgagggcaaggtgcagatggtggatcgagggtcgcggtcgcggtcgcaaagcggcacgtcggagcagcgtccgatctaatcgcgtcggcacggccgaagcgaggtgtccgtcttcgcgcacggcgaggcatgtcatcgcgctaggctcggtctcgagggcgagctgacattgaattgggacgagagtacaacaagggagcagcagttgcgaagcgtaggttgctacagtagaggattggtggtggtacaagattgctagcagtgtccaggtgatcacgcagtgaccagggagtaagtgaagtgtccgtggtgaggcctaaaaggacggccgccggccaatggcgattcgcaaaggagggagtgtcagggtattgtcgccgaggaagacaagctgccgatcgtctacgtccgtcgggggccgtaagaagggcggcccgctgccggccaatgtcgtcgagtgctggtaccggggacccgagtgatgggcgttcggagggttccttccggctacactgcctgcgtgagcgacagagaaggatgctggaaaaagctccgaccttggccggcgggcaaaggctggtggcctgcggtactgctgcaagtgctggtctgctggctgcgaccagcctgagcaaggcagcggctcctcctcgacctcggccttggtcgacagcgcctgaaagtcgaacgtcaggcatgaagagggcgtcatgggcgaaccaggtgtggcggccgaggtccagcccgagatcgtcagcacagggctccggcccgaggtcgagccgggcgagtgcggcgaggttggcggcagcgaagctgttgacgagcgcgacattcggagccgtccgcttctagagatgacgtcgtcgcaggccggacgtcagcaggaggcctcagaagcgctcgcgagccacgaaacgacactgacccggtgacggaaccccgcttcttgctcggctcggaccagacgcaaggttggccgagctcgtcgcaccggacgcaggaccggttgccctcgaggctcgtgcaccgcgtcttgcgagatcggcacgtgtcgcacgccttgctcgtccgcgaaaatgcccggcgcgagtcgcagctgagctcgccgtgcgtcgtcgagaccgtgatcagccgagagacatttgaggacgaggcaacggcaggcgaatgcgtgcggcggtaggggtgcggccgatcgtagcacgaggggctgagaggccagtccgagttaccgccaggggagatgctgcgcaccggcggcggatggagcgggaggagagggtgctgggagactgcgtcgaggatagagtcggaattggcccgccggtcgagcgacggccgccggtcgcccgcgccgagctgagcgaggtccgagacgacggtcaccggagatgaaacgacgtccgaggagaggaggagcgaccgaatgtcgtacgagctgtggcggtgacgaagcggtgcagagcggtcggccggtggcagccgtcgttgggccgcatctgctgcccagcgcaaggcgtcgctgtcgcgctgacgaccgacgttaaaaatgggtgacgagttggccggcataccgaggtccatcccggtcgcttcgtccgagcttgccgaccaggcgcggttgcgcgagataaagtcgaaggacggccgctcggttccgccgggtgtgcggctgtcgactggcgacgtgcgactagactcgacgtctcggtagaaggccgtccgcaggcccgactctcgtcgcgccggctcgatccagctcgaggtcggatccgagttcggactccagctcttgcgcttggcgtgcatgttcctgcccgacggcggcgggtgtgggacgttggtctgactgacggctgcagccgggaggtcgaaggtgcgctgcatcggcagctgctgctgaggcccggcgactacccggggccgcggggtcgtcgtcggcgagacgttcagctgctgagcagctgcgaaaggaggcgagctaaagctgaaccccgagccagacgaggacgacgtgacggacgagtcgagcgactcgccgctgtccgagatgctcgacggctggatcgcgagcggcgcagccggcaggcaaaaggacgccttgctgtcgccgccatcgtagaagtcgaaagacgacagcggcgggagggcggtttgagagcagtccatcgaccgggtgcgaaggctgaggtgttaacggtcggaggcgaggcgagactcctgtgcaagaccggccaaccgatgtcagctccggcggtcgagcgggaggagggagagccaggacgggacgcaccagggctgaatgttgagagagcgcacgctggcggaaccgaggctcggagcgaggacgggagagcccgacgggaagaatgtagggaaagcgaactgcgggatgatcgttagagaataggaagaaggagaaaggcaagccgccggaaggtcttggtcgggcaagcggagggtcgcgtcggaaggagaggaggacggcatcgaagcactcgatcccgagaggagcgtctctcgtcggtttcgaccctcgagaactgagcgggaaacccgacccgatggcggtctcacgttgggctgggcgggaacaagcggacaaggagggacgaacggccgtcagtggcgtccgtttgtgagacatgctgcatgcggaccgacggacccaccgagcccgcgtgtcggccacaccgtcggctggcgcagatcgaaacgtcccctcgaagggggaggggagccggcacacacgcacgacgtcgacgagacaaaggccgaacaagcaggaaacgacgacgccagcaagctccaaacccgacccgctcgactggtctagagagcgggaagcggggtgggctgaccgccgttccgattgctttcttcccctcgacgcttccgccagtctcaccgccagagcgtctcgccgacgaggccgtggcttaacgtcgtcaactgatcccgttgacgccatgccgcgagcaccagggcagtaagggggtgggagaaggggccgcaccctaacccgctgctgctgctcttagagaaagaggaggagagacatggatcgagctgtcgcactgacccggcgccgcaagacccccgcctgccccccacctcactcgtttcctcgagctgccgctcacttctcgagggcagcaagctcgagacggatggcattttcgctaaagatcgcgtccaaaaagaccaagcaagagagggcggcacgtacgtcagcgaaagcgcgggaagcatcagatgacgacgggccgacgcacctcttgatcttctggacctgggtcgcctcgagcttctcgcccttggcgagcttctccttgagatcgtcgatagccttgagctgcgtcatcaaatgtgacgaaagtggcagctcgaggctgtcagcggcgagtccctcgtgcacccacgaagcaagcagagcagcagggactgaccttctttgataggttccggaccttcttggcgattgggtcaacgtcagcgacctcagccgccggggccgccgcaggcacgaccgggaacgtggcaagcgggggcgcgagctcggtcgtcggcgtctggggctgcgagtcgccctgctgctggcggccgtccttcttgcccttcttgcccttcttgggcgtctgtgtgccgtcctccttcggcacgtagccaggaacgttgcgccggccgttggccttgccgccgttggcagcgtaggccggcgcaccaggcgggcccgagctcggcgccccgccctggtcctcacgaaggaagacgctcggcgtcgacgtcccggccgctcgtgcgcccggcggccggtacgccccggctgcgaccggcttaggcggcggcggagggagcgacgagacgctcgccgagaaggcgggacagggcggaatagccgccgggaagtcgggcgctgacggcagcggccgccaaagggcctggtagaggtcgttgatcgcctccgaggcgagaagctggccgccaatgtaccagatcttgaacccgttgtcaacccgcaaccgaggactcagcgtcgccgctgcaagtaaggtgcgagtcagcaatttagcccgctcttgggttacctcgtgccactctggacgtactcatgatgaacgagccgcaggggctccactcgcacgcgctcgcgttgggtgccgagatctgggcgaccttcttcatgctcttgcggtcccagacgtcgatcgtgcccgagaggttgccgaagccggcgaggaggaagaagcggccctggggctggaagttgatgtagttccggggcgagaggccgaggtcgtgggccgggttggccttggtgtcaaataggacggcctttgccggcatgtctgcggagggtgggcgcgggatcgagtcagcgtcgaggtcgaacggaccgacacgtagagtgactgacagccatagacgacgccaaactcgcgcgagttggggttccagccgtagtcgtggatgggtccctccttgtcgagcgcgacccggcactcgaagccgccgcggagggcaagcaggtagaggttggtctcgccgtagtagttctggtttgtcttgtcgacgtcggtctgcgtcaggaagaggaccatcgtcccggccttgttccagcggacgctaatcttgtcggccttgaagaagttctttcgcgcggtcgggacgggcgtcgccccgcggagcgtctgcatcgagtagaggctcagctgggccggcgcgccattcttctcgccgacaaagacggcgaggccctcgccctcggtcccgccgccggcccagatggatttcaggccctcgaccttgagccgggaagacggctgcgtgctgggcgagagcggcgtcgggaacaggagaatctcggacgaggtcgagttgtgccggatcagatgcgtctcggacggcgtaaatgaaggctgcctggagatgagggagagagcacgccggcggtcagcttaccgcccacctctcgtgcgctccgagcggataggtcgcaccagttctcctggcccttctgcgtgaagcccatgacctcgtcgccggactcgaccgagaatacgcgcaggttctggtgctgagcgttctcgtccgccggcttcgctgcaaagggcgtggaaggtcgaaagcgagcttcagagcctgacgactggctgctagggtgctcgggctgtcacggcgggacgtacagtagcgctcccaggagctgaggtacgttcccttggccgaaaacgacagctcgaccgcaccagcgacggccagttcgcgaaccactgcacccgaattggcgtcggcaatgacgatcctgcgcagccgcgggtcatagtcagctctgagtgttcggcagcagggctctgctagcgagcgactcgaacgacggcgacgggcggcgagtgacttacgttgacagcgtcgcgtaggcgaaataccggccggtcgggtcatactgtgacgtgcgggcactcgactcggggctgcagaggagacggacgagagatcggcccggtcgtgtgtgggtcagctcggctctggtcgtggctgcgactcgcgagccctagcggtctgccggtgcaaagctttgagaacggctgggacatacgcgctgaacgtcggcaggttctcgtatacgggcgcgccctggaagagcgagagcgacttctgtgctcgcactgccgaacgacaaagtgacggtcgagaaggtcgtcggcagcagcaggcaggcgcgtgtcggagggtgcgcgcgaaaagaaggccggaggcgaggtcgagcagtggagggcagccagccaggtcagcatctgtaatcgaagctgctgctctgcagcttctaacgacccgacgtacgagcgatgtggttcatagggagggccatggctgcttttgaggacgggagaaggagagacggtcgtgagagcgagagcctgccctgctgcctggctgggctgagatcctcgagttcgcggcggcggccaggggcgcgcgcgcgcggcgccaaagcgcagatgcacctcgtacggcttcgagcttacggccgacgaccccttcgcccccttgcccatcccttcgccgactcttactccccttctcctagagctcttgattctgccaggatgaccaacggcaactcgatcaggcttttgaccggttcgtctcacctgcgctcaagcgaaggtcggcgggcagcgagcaggcgagctcgcttgcttcctgcgagggcgaccagcgagctcgtcgccgcgcaacccaaccgaccgaccgacttgagccgccgctgaggacgtcggctgtgcgagtcttgctgacgctcgacgctggccatcttgtctgcaggcaactcgcacccgggcttggccaaggcggtcgccgacaagtcggtcttccttctgagatgcgtcgcttccgggggcgagcgctgacctccgcgacccgcccgaaacgacttttgacactgcgcaggctcggcatccagctgacgccgacccagtgtaccaagtttgccgaccaagagattggtgtccggatccaggagtcggtccgtgacgaggacgtctttatcctccagtcgccggcgccgccttcggtcagtctctcctctggcttgccagtccgcttggccgtcggctcccgtcggactctcgcccgactagccagccctctggctcgcctttgctgccccgtcgctatgctgaccagacgtccttcaatcacaggtcaatgaccacctgatggagctcctgatcctcatctcggcctgccggacggcttcggcccggcgtatcacggccgtcatcccgtgcttcccgtacgcccggcaggacaagaaggacaagtcgcgcgcgcccatcaccgccaagtgcgtcgccagggaatgcgaatgtactcgcaggaaatccagcgggctgacctctgctcgactgcatcactgcgactcttgccaggctcgtcgccaacctacttacgacggccggcgccgaccacgtcatcacgatggacctgcacgcctcgcagatccagggcttctttgacatcccggtcgacaacctcttttccgagccgctcatgtgccgctacatcaagcagcacatcccgacgtggcaggaggaggccatcattgtctcgcctgacgcgggcggcgcaaagcgcgcgacggccctcgccgaccggctcgagctcgagtttgcgcttatcaaccggaagcgggcccggcgcgaccaggcagagaacggcgggccgtccgagaacccgatgtcgcccggtgggacaaaggtcgaccacatggagcttctcgtcggcgacgtccggggcaaggtgcgcttcgctcggccagcaggattttactcgctgctccagacattcacgctgacactggactgcatgcttgcagattgcgatcctgatcgacgacctgatcgacacgggccggaccatctcgctcgccgcgcaggtcctgaccgacgctggcgccaaggaggtctgggcaattatctcgcacggtcggtcccgcctgctgttcatcttgacttgcccgccagctgatgcgtctcctctcgcccgctcgcttaccaggtctcctgtcggaggcctcgatgcaggccatcgcctcactcccgctcaagcggctcgtcgtcaccaacacgctcccccagtcgcaccgcgagcccatgtgcccgactcagcaggaccagggctttgacattgtcgacattacgacgacgatcgcagagtcgatccggcggacgcacaacggcgagtcgatgtaagctctggccttctgcgcgcatggggtcccatgaagacatcgacacgaactgacgccgggtttcttcgtcccgcagctcgctcctcttcagcgaagcggccttctgaggcacggctctgctcggccccaagagcccgacactacaatcttcccgtcctactcatagagccatcccttttggctgtcctttgcgcgcgccttccggacttccatctgtcaactcgtttccccggtcgcctctcgtcctcccacaccccctgggccagactgccccagctcgaccgagcccttatttgctttctttcctgtatcagtccatgcacgatgcttgtcccaaaacgggtgcgccgggccgtctagtactcaggctgctcgacctggcgtcgcatgatcgacgggggtcgtgggaagaggcctcatcaatcgacgcccatgtcgagcatagcctcggcagcccgcgtgacgtcgccttggaccgagtcgaggaccatggctgccagctcggcgtccatgttggggactgaggaggtgagagatcagtcgtcagcccaggagtcgagccacacacaaaaacgctgagcgcgaggggacgcacacatctgcgagagcgtcgtcaagctctcctgccgagtgacggcatcgcgccggtcgagctcggtctggagccgctcaaagtcaatgtcctcgtcgtcggccgggtattcgttgctgaaaggtatcaaggggtccggctggccctgggtggtggcctgctggccggggtatgcagcgcgctgggcggcgtggaagtcgcgcggcggaagcggaggcgcggccggcggtgctaccactgccgcaggaggtggcgtcgaccgcgcagacgaaggcaggacgcttagcaggtcggctgagatggtgtcccaaaggctgggcccggccgcgggcggcggaaggttcgagctgccagtgccaacctgggactgagggcgtgggctccgtatcctgggttggtaagccggctgcccgccagaagttgacgcagactgccgccggcgctcctcgccgagcgcggctgcccggtcggcatcggacccgtcgacggcctcggcaaagatcttgccgatcgcgttgagcgggcgtgagatgttttcggcgaggaagcgcttggtgtcgagcgcaaaagtctgggcgccggacgtgatctgtgccgctggctcctcgccgtcgagggtcgtcgagaagggtgcagcagcggccgagacggcggcagcggaggtcggcggcggcctgctcgggtgaaatgaagatctggcgggcgacggcgggggcaggtaggcgacggccgactcgacattggcctcaaagtcctccttggtgatgttggagagacttgtgtagtccatgctctcgataaaggtgatggtgccggtctgtcgaggggccgggcgaaagtcagtcgcagcactttcggtcacgcgcacagcaacgcggacaaaccaaggatgagaggtagtagcccgcttcagcttgaagcctctcggcgctccggaagcggttgatgtatctaggggcgggtgcggtcggtcagccgacgcttagtgctccagcacaggacagcggctcgcactcgatgttggagatgaggtgcggcgggttgctcttgaggacgacgtagatgaggatcggaatgaaggcgtcggcgccctggcccgagctgccctcgatgtggcgcatgagacctgcaggacgcgggttcctgtcagcccggtcgcgcagagagcggctggagctgcgcaggtggccggccgcaccgaagataaccttgcagcagttgaggatgcagatcagcttgtctcgcggcgccttgtagtggttgaccttgagaagctctgcgagatcgcccttcgcgtcagccgctgccaatctttagttgtgagagagcaagtagacgaaccttgaccagcaaacttgaggtagcccttgatggcctgcgcttcttcgacgtcgcccttggcctcagcctcggagccgtcgtcaaagtcgagatgctggccctcaatccagccaaagagccgggcgcgctgggcgaggacgttgtcctgctcgagatcgtcggtcgtgatggcatgcttcacgcggtcgatctgcggcgtgaaggtgctgcgagaatggccgcgacgtcagctgcagtgcgacagagtcaagtgagactggtcgaacgcacaaggggtagatgcgctggccaggtgacgcgaagggcgctgtcagccaacgcaatggatgaaaggggagaacctgatgactcacattcatgacgagcttctccatgccctcgagcgccatctcaaactcggcctcctccatcgaccgccacggctcgacctcagccatacgctgggctataaagtcgagaaagtcgcggacgagcttaatcgactcgttcatcgtgaacgagcgcttggcaaagttggtgaggaagctggagggtggcgagagcagcctcacgattagcccctctgccggcgcgcaatcatggacgggcaagcgagacgggctgacgacttcaggtacttggcgaccggctccgccgggcgtgacttgagctgttcgaggaagcgattgaagtcgaactgaacctggccgcccgagcgcgagctggccgtcgactgtgaccggaccggcctcgcgccctctggcactggtgttgcgccctggtctttcgctggcagctcgggcgccgtcgctgacgtcgccgactgcggctcaaccgccttgcgtttcgcaaacgtcccggcgatggcagtgatgagactcgacggcgccggctgcgagctgcctgcgtcgggctcctttgttggcgtgctggcatcgcctgcagggtacgtgcccgacgctgagcgaccgaacgacctggcgtgctgctcggcctctgccgcccctagctttgaaggcagctctggcggggaaggtgatggcgtcgtcgtaggagatgccttgctggcagccgaggtgacggcctcgctcccctgctccgcctggccggcgaccgcctgccgtgcatctctcgccaaggcagtctcgcctgctgcctcgactgaagagactgctgcaggtgcagggctctcttgacgacatccctcctcgagtgggtcgaactcgagcaggagctgcgacgaagctgcagcggcggcggccgaggtcgagcttccggcggcggccgactgggagccgccttcccacgtcgccgggatctcgtacgacatcgggttgcgatgcaaggagctaggccggatgcgagagagagagtgaaagccttgagaaggacgttggttttgatggagcaagacgggggtcaggaaggagcagcgggggtggccgtggagagggagagacgaaggtgggcggcggtgagcgagggacgaagcgagggggcgccgcgcagcagcgaggcagcccacgagcccgtccttcttcgactcccttgcaaggagccggccgtcactctgtacgaaaggacagagctgatgcagcgtagcactccatgttgacctcgtgccactgagcttgctgaccaggtcgaaggcgggtgggaaaggcaggctgcctcgaaaccgcgttcgacgcctgatccggcctctgctggcctggttacagaggccgacaggcccgttgacaaagatgtctctcgtcccgaaccgacctcccatggccaggcgactccgtcgaccggcagcagtcatcggcctcgtcgggtcagggacgaccgctcgggtgggtttgctcgctgatcaaacgacctgcgctcacaccccttggcaggcggtcgacgacgccatcggcccacagtgcaacttgctgcgaggccgggccttccctgtcgtcgacttcctcgcctcaccagccctaacgacctcctcaccaggcatcttgtagctcttcatatacttctaccgcagctcagcaagccaccgaatcgacagttgccccatcccaattgaagcagcactcggaacagctcagtcggccgtcactcaccttctcgcccgaccatccccctttcgactgctggccaacctcctccgaccttgcatgattcatgccgaatcgtcgtacgaccgtccgctccggctcgttgtgcccttctttgtcttgcacctggtctcattcttctcgctgaggtcggtccaggacctccccccttgcttaaggctgctgtggccaacccctgccagacgcgctgaccagcacacctcgccctccatccgcagtgccctggtggcctcgatcctgctggcaaggctcagccgtgacaagacgctctgcggcctgctcgtgaccttcatcctcttcaactggtcgacgggcctcgtgtaagtccttgagggtgctcgcctcgtgcagccgaccagtacaccaggacctgactccctttgctcgtccggctcgctgcagagctatctctggagggctgctcgacaacgctcggccctcttttgcgttgtgcctcacaaacgccgctctcgtcctcggaggctcggccgcattgtcagccgccgcgctggcgctgacgctgcgtgtgcgtagttggcagctcatgcgccgcacgataggactgtgcgctgacacgcgctgctcttctttgatcgcaggtgttcctgctcgtcctctcggtccacggctggtctcgccggtgggcgacgagcggaagttcgacggccatgcttctcgccttgccatatttcttctggatagcagtcatcatccctgccgtcctcaggggtcgagccgaccgagccaaggtccacagggccgtcttctactgcgtcgtagacgacgacggcctgacggcgctcgcagcctacattccggttgtcctgctcggcctgacgatcctccttcagatcgcgatggcgctcatcttcatccgccattggcgcgagcttcggaggctctcgcgctgttcggtcgaccccgaggcggcgacaccgaccttctcaaacacgaggcacgccttggccgaccgtttccgatcagccaacattgccctcgtctgccgcgtcatcgttttctcgggctgcgtcgtcgttgccttcgtgtgcgtcaagtcttcaatgctctgcaggcgttcccgagtcttgctgacgcccccccccccctcggccccccgataccgcgcacaacccagcgtcgccttgataagtagcgacaactttaccgctgtcgccggcgactttgctatcgcttgcatcggcccctctgtcgtcttaatcttcggctctcaaagtacgttttcgagcgcaaagggttcccgtgctggactttgccagctagccgctgacaaaccctccacgaactcttgcagaggatgttttgaaggtctggcacctcagccggaatagaccgccggccgaccacgaggcgttcatcccgcgaccaccggccctgacccagccgagtcttggcctcgacgaagtcgaggacgaagtgcgcaaggcttctgacgatcggctcgagtcgcaccctgagaagacggcgccggttcctcatcttgaccccatccgctagagcctcgcactccgttgtagaagatcctttgtatgagccatcatttcagctgcccttacacccactgctagatcagcccattcgacagccggaggactcgtactcagggagtcgtgtttcgagacgacgtcactcgtctggggctgctgcgcggacccccgggcgccgcaagccgggctgagatcctccctccgacctgttcttgtctctcacccatcatctcctttgttcagccttactgtagccctactcgttctcaagaacatgtccgccgctttccttcgcacctcgctccgctctactgcaccggctatgcgaccctcgccggtcgccatcgtcggccagcagcagcagcccttcagctcggcctcgcgcccctcgttggccagcgggggtgcgcccgccggcaagccgaccggtggcccgcctaaggacacgacccgcaccggtcagatccgtatcggtgcatcgcttgccattgccgtcaccgctgtgcgttcctttggctcggccaggcgcggttagcaagctctggtcgcctcgcttgggcccgagcttgcttggcagtcctcgtcgtcttccgcccggccgtcacgctgacatctatcgctccttcctctcgccatcgcaggcctggctctacttccgaaacccgtacatcgaggggtgagtcgccattgtcgaggctcagcagtgaggcgacaatacagtccgctgacgacgccgtatctcccccggtttcccagcgagggcaaaacgccgacgacgtctgacctcgacctcaaccacgccctcaagagcagcggcgacaaggcgcccaaatgagcggcggaccccgctctggaaaggaacactgccgattgcatgccacgcttcgacgatttgaggcgggcagatggggtcatgagatcgtgatggaggcgggaggaggaaggacgtatgtcgggcgtgaggtgagcgtgagtggtggaggggttggggacgagctaacaccgtgtattcaggagcagaggattcgttggacaaaagagacgggagatggtaagaagaggtcgtttggccggaagaaaggcggcctcagcgcagggcttccagccctctgcgcgacgcaaacggcgagccctcctcgaagacaggcgggaagccatagctcgcgcgcgactcgagcttgggccgcaggggcgttgccactgccgcaaagactgggaccggcggagggaacggcccggtcgaccggcgcgagtaaggcggcgacgaccgcgctgaggagggcgccgacgggaaggccgagacgctcgtcgagacgggtgccgaggcgggcgtgctcgtcggcgcggacgagttgagtcggtgggtccgcttccgcatggccttcctcgggccgcctgccactccaggcgtagcaggcccgccgccgtaggcagagtttgaccggaaggcggtcggcgggtgactccgcatcgcgacgtgggcgtgttcgcgcgtgtattgtgagagggtgtggttcgagagcgagagctgcgagaggtgcgagatggtctcgggcaggccttgcgagaccgagagcgtccggttgtgctgcggcgagaccgagaggagcgacggcggtggcggtccaaagccgatggcggacgatgccggcgtcgctatcgaggccgacgaccgcgaggtcgacatcgacatcgagagtggcggcgtctggtagcgctggccgcccggtgttgacgacggccggccgaggtcgcacgactgggcacgcgagacgggccgtgagcgtgggttgaagctcgaagacggtgcgggggaggtgccacggtggtgcagcgacgatgaatgcacgtggtgcgtcagacggggcgtcgtcggctggctcatgagcccgggacggaggaggaccgtcccaccgccgacggcgtggattgttcgcggcgtcgaggcgacagactgagcgccgcccgtgtaggacgatcgtgattgtgatcgttcgagcgccgggaacatgccccgaacggcgctgccgccggcctggctgtagaaatcgcgcgggtcgtagacggacgaacgcccgtcgtcgtcgagctcctgctgccggttcatcgcggccgacccgctgcccatctcgtcgccgtcgccgggctcgggaaagtcgtcctcaaagatctcgccaaagccgcggttgcgctcccagatcttgccgagctccgagccgctgatgacggtgtgcgccggcaagccttcgggccgaaggccgtaggtcgggtcatagtcctcgagatcagggaacgacgagctcggcggcgaggcaggagtcggccgggccggcatcgttgcggatgaaaaggactggcgcgggccgcgaggcgtcgtccgggccgagtcgtgctgctggctcgtcgacgcagccgggtggccctctggcgtccgcggaaggcctccttcgccgcctgcatagagatgggccgaagactgatacgaagccattgagggcagatgcgccggtcgctcgacctcgaccgatgcctcgctcgagaaccactgctggctgagggtgtggatgatgccgggcaagtcctcgcgaaacatctcgcggagctgaccctcaatctccttttggataaagcccttgaggaccgagatcgagtcaaaggtcgacgagacgtcgagcgactcgagcgggtcattcttgaagacgatcgtgatgccgttgtgctttgagacgataaggacgacgattgcccggagccggacgttgctcagcgtgagcgccatcgggacgagcagcggccggtgggcggccaggggcgctgttgatgacggcagcggcgagggcgaagggttgagcggattagcctgcgagaggggagggaggtcagcgagcttgtcctcaggatcggcgcaccacaagctcgcggaacacgacgacggcgggagtgaaggcggacggacctggacccgagcgccgagtacaagccgagcgtcgccatcgtagccgagccggaagattcccttgaatcggtcggcctggaggtcgccgatttcgagcaaggcgagcgtcggaggctgcaaggcgaaggcagttcggagggagggcccggtcggaccaacgtcagcagccgcagcgcggtggagaaactcgtccacctgaagctgcaactcatcctgcgaggcaggggagggtaacaccggataggagggggtcactcacgatcttgcccatgtcgagctcccggacctcgatccggccgtcgatgagtgcgggcgtgttgcccttgttgagggcgcgctcgaggatgcccttggccgactcgcagaacgagggcgagaaggcgtcggcccacttgaagttgaaggacatggcggcagagggttctggacgggccgacgaggggcgctcgagaagaacgaggtcgtgcgatgggctagccgggtcgtccaggcgggaggcacgaggaggaggagagcgcggcgcacgaccacctcgtcggagtgctcggcttcagtcccaaacggcggttaccccccttgaaattggcggcgaggggcggaaagcgaggtagccgggtagagagtggtcgaaaaggagctctgcgcttgtgcaaacagctgagcagccgatgcggacaatgtttgtggacaaaagggtgtcggtcggcgagcagcagaaatgaggtcgtcctcgtgccgaagaaggcgggcgcgcgtcgtctcggaagctctgccggaccgagcccgactaagtgcgacggacgctccctcccttcctctttcttctcatctgtcgagcagggaggtcggcaggaccggcctgaccttttccttgagcgtatcctcaaggtgacgagcgaggcgaggtctgtgacgaacgcttcgagcagcgtcggctgacggctgacgagctgctgtggctggccccgatgtgcgacctggctcgactctaacctgagcgagccaacgtcaatccagtcacggcagcagggatggcaggaaggactctctggcatctatgttgatctgctggtacgatcagccttgcaggcttgaggtcgatgggtaaggaggctgccggcttgacgacaggccgggcgcagcagcagcaccaagcgcgggccgggagccgacagggctggagcacgtcgatctctgacaaccggcctctctcatccgccctttgcaatccccttcggacactcatcatgcagtcttctacctcgcagcaagtctcggcctctatctcgaggatctgctgcttgggatcgccccgcgaggtacgctcgtcagccgtcggcgacggccgagcctccctcgtcatgctcggctggacgaggctgacccttgctcctccttcgacacccaggttggcctaactcacggcagacaagccaagaagcagatcgatctctctctcgccttctaccgggcgtactttcaggaagcgagggacctgtcgtggccgcgggcgcttgagcttgccggcaggttcgttccgtacctcgccgaccggcacgccgacctgcttgccgagctgcagggcatcgccgacggcgctggcgtccagctggacgagatcctggctctgaacgcccgatcagaggtaggttcgccgtcggattccatactgtacagctgcattaagcgctgacctgcgcactctgtgccttttcagatcgccctgtcgtccgactgggccggccaagccgctctggacggctgcacggcctttgcttggaaccacgaaggatggcagtggaacggccagtgcgttgcgctgatcggatggcttgtgaccctagatgctctcgagaagcggctgacaaccttgtgtatttttcccaggaactgggactggaaggccgtcgccgtcgacctcctgatcgttctcgagatcgacgcttggcccaagacgggacgtccagcgatcaagatgatgacggaagctggcgttgtgtgtatcaacttgctggcgtcgacgtcgactgccgaaggtcatagcgctaaccctgttttgcgcacgccctctcttgatagatcggcaaaatcggcctgaacgagcacggcgtttcgaccatgctcaacgctctgcgggtgagtcctccttaaagctcgccgattcctggcgagcaagtctgacgtctacggcagatccccgagactcgcttcgacgccctcccggtccacctcgtcctccggtgcctgctcgagcggtcctctgtcgccgacgcgctcaactacctccagaacgtgagctcggcatcgaccgccaacgtcgtcctggccgacccaacggcggccgtctcaatcgagctccacccgacacgacccgaggtcatcctgccagatgcgaacggcctcgtcctccacacgaaccacctcgtccagctcaaggacgaccgcgagatgttcctctggcccgactcgctccgacgactgccgagactcgacgaggtcacccggtcggctgtcgcagagggccggccgcccagcttcgaggtgtaccggcgcatcctcagcgaccgaatcgacggcaggacgagcatttgccggcatgagggcggcgagggcatcgagactgtcttcagcatcgccgtcgatggccagggtcggcgaggtgaggtcaagctcggccggccagatgaagagggcgagatcctcgtcctcgcctttgggttggtctgacgagggacctcggaagctgtcgaggatctcatgtctgccttgttgaccgtcgagcgaatcagagaggagtggatcatggtctgagcgggcaaaatcagcagcggttgcgggcgtggctttacctctcgtcccactcctcgcgccagacgatgccgtcggagctggcgagggcgaggcctagggaccgaagctcgggtgcaccctcgtccaaatccaggggcgtgcgagtagcgcgatagtcgaacgaggcgacagtttgactgcgctggttgcggtccgtcaagtccgactcgatgaccaccgtccggagggaagggaagcgatcaggagcggaacggattagcaaggaaacgtgcttgaatagggaccgtggggtcgggctgtaggtcaaccgcagcacgattgtctcaagcgccgcgaacgtcacatgagggcggggatagacgaagtccataagatgcagatggaccgagacctggcggatgctcgacagagcatgaagcagcgccgggggaaaggcctggaatccggccgacggccaaggcagcaggagcttgagtgagcgaacgtcagtcaagcgggcgggcccgctcgagatctccgtgggtgcaactgcgcggccgtccaagccttggggccaggcagggtaggagttgccaagggagtgcaagccagaaggcaggagagccagcatctggaccgcactcgtcttgagcgaaacgatgtcggccgaattcgggtcgcgaggccaatcaatgctgcattcgaagtgctgaagcttgctgagatcgaaccagtcggcaagcgcctcgtgtcggtccgtcaatagcgacgccgggttcgtcaagttgacggagagcgaccgatcgaccccgccagtgactgccttctgcaggcccgaccaatggtgacggccagcagaggccaatcacatgctggaggttcggattgtcgaagacgccctggagggccgagggtgagttgagcaggttgatctcttccaccagctccggaaagcgttcacgaagggccgtcgaatgccagggactccgcaggctactgctgaagctgatggaatggaacagcagagcttggccttcgagctaggacgcacaggctcgggacgtcaactcgccgccagcttatagacaagcggagaaggcaacacgcaccgcccatgccctagagacccggcatagagagccgatcatgcgaaacgacagcccgctccgttcaagagacgccccaaaggtgcggaggatctcgatctggagctctagcggcagctcggatccctggcgcaacgagatggttgagcaaaggggtcagtcggccgaacgggcgtgcggcgtcatcagacgaccctcgttacgacgtgcgagcagagcgacggccggcatcttcaccggcgacagggcgacaagagatcgcgctggagctgagctgagctggttatctttgaaagagagcgaatggcatagtcgtcgagcgctgcaaggacgaggaggctgaggctgaggtcgaagctccgttcgtcggctcacctccgacaccgaccgccttcttgcttcgcagctccctcctcgtcgtcgtcccttctcgagagacccttcagcccagcatgtcgtactttatgacccatctgccgtcggcctggtgcgttcatgttggttggggagctgcctgtcggcccatgtaggaagctcgggctgacacgccgccgccggccttgccacccgacccaggcacgtcgaccgtgagctgctttgctcctccttggtcatggtgcagagaggcctttgcgactgactcgttctcctgcgatcctttcagagtccatcctgtctgaggaagaccgcgtcgtcattctccggttcggtaagctgcttcgcctggcagcgctgagctgggtgcaaccttcgaggctgacccttggccgcctccctcgcaaggcaacgactgggacccgacgtgcatgaagatggacgagacgctttactcgatccaggagaagatccagaactttgccgtcatctacctcgtcgacattgtcaaggtccccgactttaacaaggtcagttctcggctcgtgtcgactcgaacgccggctcctgccggtggacgacgaagctgacttcgattgctcgccttcgcacgttacgaccagatgtacgagcgtgagtggttccggagagatccctttacgccgtcccaagaggccgccggcgctgaccttgctcccttgcgtcgcgccgccccagtctacgacccgtgcaccgtcatgttcttctaccgcaacaagcacatcatgatcgacctgtcgaccggaaacaacaacaaaatgtctgtcttagctgccatctgaccttaccagggacttgcgctgaagcttcatccgtccgagcagcaattgggccatcactgagaagcaggagatgatcgacattgtcgagacggtgttccggggcgcgtccaagggccgcggtctcgtcgtcgcaccgaaaggtacggcgctgaaagacctttctcgcttctatcgtctcgcgcacgctgacgttttgcctctcgtccgacgcctgctgctcgtagactactcgacgcgtcacagtacatcttccaatccctctctgacctcgctcagcttaaccgactgacacccttgcggccccgtccttgttccactcatccgtcagagtattagagccgacgctcgaaacgacccctcgctgcccaggcccgctcgcaggcgcctcggtccgcctacgactaacgatctctataatgcccctcttgccctcacccctccttgagccttcagagtcgtgttgcgaagcagtccatatcaattccaggcgcgcaccaggcgagatacgacggggctcccttggcaagagcccgaccggtccggccggacctcacccgggaaaggggagagagatctaaataaggagcggagggttggcaaggggcggctccatcggccgcgcgctcatgccagatggggagtcggagtggggttgggggaggaacgtaaggcttgactccgatttactggccgttggtcgccgcgctggcgttgcccttctcgaccgtctcggccgtcgccttgtcgacggcagcgtcacggatctcgtcggccgacttgaggaccatgctcgactctgggtggggcgggacaaactctgcggcgttgcgagcgaggtgctcggcgaggcaggccttgccggcggcggcagcgacgaggccgaggaacggcggcgacgggttgagcggccgcgagcaaaattccgggtgggcctggagggcgacaaagtacgggtgcccctccatctcgatgatctgcatgcgctcgccgcgctcgtccttgccgatgaaccggagcttctcgccctttgtgtcggttccggcctcaaacgtcggcacgagcgtcgggttgacctcgtagcggtgacggtggcgctcccagacggcctccttgttgccgtagagctgccggatctggctgccctcggtcccctgctcaaagatcgtcggccggagcccgagccgcatcgtcccgccgaggtgggtccgtgaaatctcgggcatgaagatgacggccgggtgggcagtctcggcttcgagctcggtcgagtttgcgcccgtcaggccgcagacgtgccgggcccactcgatgacggcgacctggaggccaaggcagatgccgaggaacggaatcttgtgctcgcgcgcccacttgacggcaacaatcatgccctcggtcccgcgctggccaaagccgccgggcatgaggatgccgctgtgcgaacgaaaaaaaagttgtcagtgcttaggtgccacgagcaagacgaaaaggaggactgacccagccgagcacatggctttccaagcatcgtgatactttgccggatcggtcgcctgggcctcgggctcgaggtgcgacgactcgatccattgcaggttgagcttgcggccgcagcgcatcgaggcgtgctcgagcgacttgacgacggacatgtacgagtcctgcatgctcgtgtactttccgacgaggacaatgttgaccgactcgtacatccgatcgtgcctgcgtgacagcgatcccagagtcagccggccgtgcctcgaaaaacggcgagatgcagaggacgcacccagacgtcagctgccgccagcggccgagcagcttctcgccccgctgctcgcccttgacgccaatgttaatctggccgagctggagccggtcctgaaggtaggaaacgaggccctggtcgcggagcagaagcgggacgtggtatgtcgaggcgacgttgtggacgcccatcacctggttgggcttgacatggcagaacatcgagaccttgtccatcgtcgcccgctcgagctccttctcgcaccggcacgcgatctgggcgggcgcaaaagtgcagtaaaggtcagcagaggacgccctcgaaacgagcgcccgtgtcttacgcacgaggtccgggaagaggccgagcccacgtaggtcgcggaccgtcgcctgcgtcggcttggtcttctgctcaccgccgacgacggggatgagcgagacgtgcaggacgcaaaagttctcgtgcccgacccggaactgaaactggcgcatggcctcgatgaagggcgcagactcgatgtcgccgacggtgccgccgagctgcgagaagagcccaagggcgtcagtggctgtttacagatgtatcccccggccgagcaacccgaaggggggagacgcacctcgatgatgcagacatcgggctcctcgtccgtctcgtcgaccggaagcttggcgacttgctcgatccagtcctggatctcgttggtcaggtgggggatgatctgtcggcggaaagaaaagggaaggtgagcggccgtttcagaattcggtggaggctggagccaagtcgcacctggacagtcttgcctaggtagtctccgcgacgctaataatcgcaagacgtcaggaagagagcgccagtgagctcgcgcggttcacaaacggaagcgcagggcgacgacggacctccttctcaatgacgcgctggtagactttgccggtcgtcaggttgtggttcttcgagagcgtgacgtcgaggtagcgctcgtagttgctgcatgcaacaggcaaggagccgcggtcagcccgagcctcaaacgcgaagcagggagagccgaggaagctgacacacccaaggtcaaggtcgacctcgccaccgtcgttcaaaacgtagacctcgcctggaacgccggcccagggcgaggcgagccacaacgagtcagccctttggtagtcctcaagagacgcgccaggaaggacgcaccgtgctcggtcggggccatcgtcccggcgtcgatgttcatgtaggggtcaatcttaaccgaggtgaccttgagaccggccgtcttgagcagcaggcccgtcgacgaggctgcaagcgagaagggagcccgaggtcaactcaagctggcgaccgagacgcgcgcgcgttgagagggagggaccgaccgatgacgcccttgccgataccgctgaaagaggccagcagagggcgagacggttgtcagcagcgagctctccagtagcctttgcagtaagctttgagcaaggcaggggcacgcacgagatgacaccacctgaaggagagccggcgcgtagcggaggtcgaacgggggtcaggttccggcgtcccgacctcggccagaggctcgcaggcgaacagagcaagcaggcggagactgaccacagacgaggatgtacttgcgggccatgctaggcaaaactgtgaacttgcttctgaaggaggacgggttgctgctgctgggctggaaaggcgcgaagcagcagccaggccagagcgacccccccggccgaggccgcgccttgcctaaatttcgggagaaataaaaaagggtcgcgcgcgcgcaggcggccgtttcggagggacgagacgacgacgacgcgtcaagctcgcctatcagtcatctgccagacaacgtcagtcgctctacgcgccacgagtcagcgtgtcgggaagccttcgggctgatatacatgccgtcctcagcactctctcacgtccgatgcaggctgaatcctccgccaacctcttccggaccgacgccgacctcgtccgcgacgccgcccgagcggccaagctcgccgggaccgacagcgagctcggcgcacccatcgcgctcgcgagcaagccgctcgcgctgctcgtcaacggcgacgacgcttgggtcgctgagagcgggtttgtcgtccgccggcttgatctccgtgtgcgtcctgcgcgttttgatgaacgacctggctcgcagaagctcacaggctgaccccccatcgcctgcttctaccatccagacgggcaagacgatccggcttttcaaaggccattcgggccccgtcacgtcgcttgcgctctggtcgcctcccggccgcgcgccgctcgtcatctcgggctcgtgggacaagacggtccggatctcggacgtcgcggtgcgccacaggcaaagtttacagtcaagactggcttccaaacaggggctgactaggaaacgcggcccttttctttctcgtagaccggcgaaatcgttagcgtcctggccgcccacgccgacttcgtcaagacgctcctcgtcgtcccgcatccgacccggccgctccttctgaccggctcgtccgacaagacgctcaaagtccatcttctcgacccgctcctctcgcctaccgccggcgctgacgggccgagatcgctcgagacggtccagacgatcaaggtccacacaaggccgatcacgacgctcgcgctcggcccgtcgccggctgtgatgggaaccggcccagtcgaggtcctctcaggcgactcgatgggccgcgtcatcgtctgggccgtcgaggataagaatgacggtgccgtcgagctgcgcgaggtcaggcggttgaaggatgcgcagacgagcgtgacggcgctgagcgtttgcgacgacggcgtctggacgggtgagtcgttgccttgagtgctcccccctcaccccctgggtcagcgcaattgctgacgacgccgacgactttgcctggcggcccctgatcagcgtcaatggacctcagcacgaccttctatccctcgccctcccaagcccggccgccctcctcgctcgctcccctctctccaacggccggcctcccatcctccgctctcgccccgctctcgctcctctccctgccagacgcgcgcccgccgctcctcatcgtcggcttcgcagacgatacactccggctctactcgctcgaggacggcgagggcgcggacgccaggctcctcaataaccaagagggccatggcggggaggtgagcgcgctcgcaagctgggagaaggacggcgagcggtgggtcgtgagtgcctcgctcgaccggacgctcaggcgctggaagctttccggtccgtccatttcgtccttcctgctggctccgcgctcttcaccttggcttggctggctgaaaccacctgttcgcaccgacacagacctgctcaaccccccagctccgcagcttgaggagccgacaacggccggcaagggcgatacggctgctgcgccgggcgcgggcgggatgacggctgaggaggagcgtgagctggcggagctcatggggtccgacgtcgacgacgactgattcagatgggtcgaacgagtcatgcgtctgacagaggggcgatggacttgcaccgcgacaagggacgctgagagaggtgggtgccatcttccagaagaaggagagagaggcgaggaggaggcgccccctcagacggccgactgcgcacgccgcaacggcgtccgttcgtcgacagtcggcggcatcggctcgtcttctgctccatctctgccctcaggcccgacagccgacggcgactctgcgccgccaaggctggctgggtcggacggccgtcgacgacgcgagtagacgacgtgctggccgataaagaggaggtcgaacgccagtgagaagagggacatgccgctgtcagggcgggatcagagacaaacgaggggggtccgccttctcttcgcctcagcacagctcagccatctagctcggccaacttcctctgccaccagcgcatcatcccaccccgcttcccgcccttcgccgacagtccgctccactctctgcaacctcctcctcctcccctcgccggccatggcgcgcttctcgcccgcagcccgcatcgcccagatccaggcttacgctgaggtcacccggtcgctgcccgccaacctgacagcccacctccaaaacgtctcgagcaagcgcctggccatcacctcgatcgcttacacgtcgatgaacctcggcatctcgaacatcctcctccggcacggcttcatcagcaacatgacgcggtgcgttgggccatgtcggctggcagtgcgaggcggatcgctgctgacctcttcctcttgatttccgtctcctggcagcggcccaccgttgcgtacctcgaaagagcttccgaggccagaggcgtttgaccacgacaaggttcagaaccaggcgctgcacctgtgcgtcttggccgctagcgtcctccgagcgacgaccctcttcgcgtctacgttagtcgctgaccctgctcctgcggtcgccatctcgcctccaggacgctcaagtaccgcggctcgttccccgttctcaaccgcgcgcggctcatctccaagccgcgcatgcacctgtacgcctcgcacggcgagctttttggcctcttgcacggcaagcgcatcaagaaccaccgcggcatcggcgcgggcgaggtcctcatcgtaaggacacccgaagggagatatctcgagggctgggaggcgctcgcagaaggtaccggcggcgaggtgcttgctgcgttcggttgagggggcgatgacatggtcgtccaccaagaaggacctacgaggtgatggagattcaggctcgggtgctcgctgaccgctcgcaggcggacctagcaactaggcttgcagatactgaaggagtcgttggtttctgaacacttcgctcaagcaaggctcttggatcagacacctttcccgccagcgccttctcgcgccgtcgtcgtctctccatccccgaccggcacctggcctccagcagcctcaacagcagcgacagcctcggcttgctgcttgttcttcttccgccgtttgcgtttcttacgctccgcgctctcggggccgccttcgtctgccccggcggcggcggcaggagcaggcgagggcgggtctagattgagcagcggcttggtcgaccggctggcggtcgctgcggagggcgacggggcagatggccctgaagtggctggtcgaggaggttgggtcgacgggctagccgacgaagaggcttgcagagtcgccgtcgagctagatgacgggcccactgctgctggcgccgccagcgagctcggtcggctgaccggtggggtcgccagggccggcacggtggaggatggccgcgccgtcgacggtcccttcgagcgcgttgttatcgcaaatggacccgcagcttgcgccagacgctcatgctccttctcccgctccttttggagatggagcagaacagccggatggaccttcgccaccgctccattcttccctttcgctttggccttcccgccggcgttgtcggccgtcggtgtcatcgttgtcgacgacagcgccgccgccaccttcttccctttgccaccgccgccaccaaacgcatcacccgccgagcgcttcgtccgctggccgaccgagcgcgagcgcgagtcttcgtcgtcggacgagtcgtcgtctgctaccgcactggcggcgcccgaaacagacgtcgtcgcccggttcttggaatccaaccggccataaggcttggctcccggcccaggcgcgtgccgaccgacgtagcctcctgctgtcgaaaaactgcccggtcctcctataggacctcctataggacctcctaagggaggagcacccagtggggtcggacgggatccgttctggccaggcttggccgtgagcttgcggacgaggcgctgtgaggcagtgatggtagcctgcgggagactacgagcggggaagtcaggcaggacccttgtcaggcaggatcctttatacagcaagctcgccagtgtccttttcggcctaatgcaagcccctcggcgggagaatgccctcgagcgacaacgccgagaatgaggacgcacgcgtccgactgggcgagctcctcggccgtcggtggcgtgtagccctcgacgtgcctaccgacgaggttcctgagaaaggccatcgagagggccgcttgggcctggaactctgcgagctcggcctcggacggtgtcgacatggtgcgtaggacggagggagggaggatgacggtcggaggcgagcgaccggggtcgtcgatcgccttccaggcttgcccttgcgtcgtcgagctcagctggccgcccggacctcgaccagtaccctcgtacaccctgctgccttctccacgagccgcgatggacctctcgtcgctcgccacgtcgcttcagacgtcgaccagactgacaaaggccgaaaaggacctgatggagaagtttcgcggtgcgtccccttgtccccttcactcccctccgacctcgtcctcccacaaccgcctcgctcgctcgcccacgggtcgcctacctcgccagcttgcctgcccagtcatactggcgcgctcttgtgtctaagagcattggagggaaagggtgcctcagtggtcacagagcatctcgctgaccctagcccttgcctgccctcgtcttgctccagccgccgccctcagcataacgacgctctacaagagctcgctctcgacctccaaggtgcgcggccccagtctcaacttctcttacctccttactctcgactgactgcttcccttctctccccccgctagcgcgcctactcagccggctactcagcctgcctcacggacgtccttcagatgatccagcacggcctctcgaccgagcacggccccgccggcgacggcctcgccaacccaatgacgatcggccgggtgatggactgggtcgaggcccggcaggagacgatcagggctgaggaggaggaggcggacgaggagggtgaggctgacggcggtgggagtggggttggaggagcgagtggaggagcagcagcagcagcagcagccggcgagaggatgggccctcccgcctcgaggtcggcggcaggcggaggaccgtcctcgtcctcaacacgcttcacagtctcctcgacctcgacgtcgtcggcgcggcagactaccccgaccgggcctcctccaccgccatcgccgccaccggccatcccgcctccgacggccttcgccaacgccgtcgcctcatccgcgtcctcgaatcagcagccccaaacccggccagcgttcgcccgcgcccagtcgtcgtcatcctcgatgaccggcatcggtaccgaccggcctgcgaggcgactcgtctcgtcgcccgtgacgccgaacacgtcgtcgcctttgcacaaccacacccacggcccgtcggcctacacgacctcggcgagtgccggtccttcgtcagtcagtctaccggcttcgccctcgctcgcgcggagaaagcaggtccagggcccgtcgagcctgagccagagcctgacagggccggattcgagcatgtcgatgtcgtccgaggggacggtctcttcgtcctcttcctcgtcgacgctcgcacccgtcacgggcagccagcacacccacgtgccccagtcggacttctcgttccacgccccgtcgtcgtctggcatcgccccgctctcattcggccggcctacttcgagcggacacatcggccggccgccgccccctccaggctcagaggccggcggcagcagcagcgcagcgaacgtcccgtcgaagcggcgcttcgcatcaaccctcctgccggcgtcgacgaccggctcctcttctgctgctgaccctggcggcggcgcgtcggctaacgaccagagcatggcgcaagacgacgctgtcgccagcagcgccgctctgccctcgtcatccgccgccgccctctcgcgccgcaaaggccggcggagcggcgcacggcccgtcgctactcttagcgagcgggaagggcaggaggggaacgccgatggtggcagtggagcggcggatgacggcggggaaagggagaagaagcgcatcgcgcggaggtaaagggttcaggtccgaaatgcggccgccgttcgtccgctcgcttcggttccgtccttccgccttgcatggtctggcactgtacgtctcttgctcttcccgctctccgcttggctgcgatctttctgctgatcctcctcgtctgctgcagagccagccccttgaccattctttccgtcccttatcgcctccctccctcgcccgccttacaccccactccgctcaccgtcccgcctcgaccctacacacctgcctactgtacgaccctcctcccatcccactttgaaaccgctttgcatcacctcgtttgttttacgttttcgcgacgcacaccgacaaggaaggcagagaccgagcaaacaaagcaagagggccatggtgtacagagtcacgagaggaagacgcgtacgggttttgcgagagcgggtccgagggaaggaaaaaatgacgagtaggctggaaaaggtccgatggaacagatggctgcgaggggagtgagaggaagtggtgcatgagaggcgggcacaagccgacaagaggggtgggtggcaggaagcggcacgaaaaggggaggcctcgagccgagcttgcccgactggccagtgacaacatcggctggaggcgctcggccggcgcccgtagacggacgttgttgaggcttggcgcgacgcctgatcgacgggctgtgagggaaccggtcgagagcatgcgcgagccctggaggagcctcgacagggccagcctcctgagattatctgccggccgcgaggtcgcagattgctcaccaccacggcgtccgatccacttctcgtcggcgtttaaggatcgcagcaaggatccgtaaaggcgttggcagagacggtcgccacggctggacggcaggcttggctgctgatgacagcatcaaccgggccttgcctcgtgggagcgactttggcttccgacctgcccagctcactggatggacgaacgagagcaagacaacatcagtcgttgagaccagaggctgaagggagacgggcgcgttgggacaaacctccgctgccgccgcgttctgcgagtaaaggagcagctggtcgccatagcgctgcatctcttcgagcgggatggcgaggttaaagtcgttgaggaggagaaactggagttcgagctggttgagctccgactggggcaggccaccgaccttggcgtagcgcgagttcgtgtaaaagacgtctgcaggcagggcgagcacggtcagcggacgcccggaagcttgctttcaagcaaagccaatcgcaaacacgcaccagagaaaaacttgctggcgacggtaacgccggcgatgacgagccgatggacgttgaagctgtcgatcgcaaacggcttgccgccgacctccatgctgagcttgctcatccggtcaaagtagacgaggagcgagaggaagacctcgttcgaggccgggcagtacttgaggatccgctggaggtagacctcgatgttgatgccggggacgttgcgcgcgtgaaagcagagcgaggacgaggacgaccggaaggccgtcagcgaggccgagaggtgctttggcgcgacgagctgcgtcgacgatgacgaagccgggggtgtgatggttccggcctgcgctgtcggtgttggtgtcgaatcctgccgcgcgctggccatcgcagttgctgcagacgaggccgacgacgacgtggacgagtcacccgcgagcgaggctggatgcggcgacgacgatgcggcctcaaacgacgtccgcggcgtgctcgccgccgccggagcgtgaccgagcgggtcggtcggcgtccttggcgtggcgtccgactgattcgaggcagccgacgaggtcgactcgagcgacggcggccggctcatcggccttccgtcgtcctcgtcgtcctcggccgccgccatcgtcacgtcctgctgaccgtccgtacgcggagcactctgctgtcgtcgccggcctgacagcggcgacgtactccggctgccctcagcgctcggcggaattgactcctccctgccatggatcctgccggccgacgccgccttcgtcttaccctcgtcaccctcctccttccggaggacatcattggcgcttgcgatctgctggagcaaggccgccaggagccggacgaggtcctgagccggatacgccacgagatcaagatgggtcggcgcgggcgccgagactgctgacggccggaacgacgccggtggcggaacgtccggcgtcgtgctcgtctgccggagggcgtcagacgccgaggcggcgcttcctggccgagcggtcgaagtggacgcagctggcgacggtggtcgagctgtcgaggtcgacgacgtcgaggaggctgcggtcgggcttgacggcggcggggcatggaacggctgctggctcgccagatgaggcgcctcttggctgccggtgtacgagctcgatcggcttccgtgattggaaactgacggctgctgctgctgctgctggagaggcggcgacctcgaatacgaaggaccctgctgggcaagctgctgagggcgctgagcgctgtcgccgccgtgcatgctgctcgaggccgacatgcgggccgaaacaaaggcggcgtccacggacgacccggacgagtgcgatggccttgacgaggccgccgaggacgacgcaaatgagctgacactcgaagcagaggcgtgcgtcgccctgctcgacgacgagggcgagcctcgaccggaagctggcgaccgagcggcggaggcagaccctccggctgcagcaaaggacgagggcgagccggcggcgttgaacgtcggcgtcacccctccagcagcggccgccaccagcgaagacgaagacgaggagtcgcggctcgcccggccaaagctcggtggggcatggcctgacggccggcgccgacgtgcgcggtcatcctgggccggcgtcgaggtcgagccggtgggcgggtcggtgcgatggctttggctggccccggtgctggtgctgctgttgctgggtccgggcgcgccgtcaaagcgggcgccgtcgtcggacgaccggcgatggtcgtggaccatcatcgcctaactgagaatacgggaggaggggagaagaaagagagctttgaggctggagacttgaggggtcgaggaggagggagggcgttcgaggggaacggaagacggccgggcgcaaaggcaagcctcaacgtgcgcggccgggcagccagggcggggtctcccttgcctgccctgtcctcccgaagtaccctcctcgcagcccctcgtccttcgtcaagtggagaaggctcgctcgcttatgggtcgctgatcagggcgcaggtgaactctcgtccatgtcggagcacgagcgagtgagggcgcaacgtcgcctctgtctgctccggcgttccctctccaacctgctgcgcgtagacccttttcagcccgggaccattggtcgtcgatccttgctggccggatggcccggcctcggtaccgctttaccccttcacctccacccagtcagtcgcgaacagagagcgtttgcgagtgatgagaatacagacagtctgaacgggccctctgctcgtcgagagacgcaatgctgcgtcctccctcgggacccctcgcccgtttgaggcgagcgcgatcctggctactaatcgcgcctctcgcgcctctcgacgagcgcgccctacttccagacagacgacgccagtgcgggctcgttcctccctggccggacagccggtggtggctggtctgggccgagcgaaggcgtcgtcgacggcgccgaactcgagccgtcctcggacgagatcttgcggacgacgccgtcggcgccgcgctcaaagcgcggaaagcggtgcttgttctcctggatccagctggagcgtagaaagatagaaggatcggggtaaatgagccgtcagtaaggggtcttgagaccagggcctcaagcagggttctgctttggccgcgcgccgccgatgcaagacgcacctttcaacctccgattcggtcggcaccctcccctctcttgcgagcccaatcttggcccaccgccgatggaggttgtgcgccatccgttggtcctgctcgtacttttgcaggacgtgctcggcctcgatgacgagccctgccattgtcgcgctcgaaacgagaaagcctttcagcctgcaggcagattcgagggaagaggtcagcaaggcctggtcgagaccgaaatccatctcgagccgtcgtccccttggctgcgatgtcaggttgaagacgagcggcgcgcgcagccgatgtcggccgccgacgtcagagccctccgcggccgcgaggctgggcaggacgtacgcaagcgtctgccgcctgcgacatcgagtcaagattccaacatgggaaacgaggtcagtacatagtcaggctgagcaggtcgcggccaggacggaccggaatagaggaaactgcttgtgcgcgacaaagcaggcgaccgtcgccagcgccgtgtacttgatcatgccctgagggtgggaaatcgagtggccgtcagcaggcaggtcggcctcttagactcgaggctaatcaggcatacatatatgcctgcctccttctggagcttggacgcctgcggggtcgagtacgaggagcgagcacgagtcaacacagggtccggagatcggagctcgattgccctgagcgtgctccggacgagctgccgtcagagaggagccgcacctcgtcgccgtgcttgttgcgcgaggccctttccatcatcttgggcgaaggatccgagcacgtgcggcagacaggctggggagatggtgcggtgagggcgaggaggatgttcaggagtagacgaccccgatcggctgctctcgcttctcctacgcggggagcgccggccgaagcagcagcggcagcacgagtttcgaccctcgacgacgacgacgacgaccgacaggccagacctcgacgccccctcaccaactcggcagcgcccgcaggagccttcaccttgctttcacagctctcaacgtttgctcctccccaactgcctggcccagcgaacgtcgctccttcgctccctgctctcgccaaccctcggagaccgactcgagcgcggccgacctccgaccagctcgccatgtcgttcgagacagcctacatctcgacctcggccaatcgatactcgcattgttccgacatcgcgcccaatggttccaacctcgtcgtgttcggtgctgggcgcggcgtcgccgtctggcactctgctgtgcgtttgacctcgcggcgacgcttctcccaaacgtcactcggaagctgacctcaggcacctcgactgttgcttcaggacgagaacaagcgaggcgtcaaacaggtgcttggaggacatgagagcgaggtcacctcgatccgctttctcccgctccgacggcgcccggaaagcgagccgtcgacgagctcgggcgccggagaccgtcctggcggcctgcggttcgtctccggcgacagggacggctggctcatcttctggcggagaagcagcacgatggccgaggtgcgtcctccaagttgatctcagccttatcctgccgctgtcggtctgctgatcctcgcaaacgtgcctcggcccctttgctagtgggagcaggcgcacgtcgtgagccaggtccatgctggctccgtcacggccatttccgccctctccgacttctcgccgaccggaagcgccgacgatgtcgccgacctcgtcctgacggccggctccgattgtcttgtcaacgtctggctgtgggatgggctgggtgcgtctctcctgcgctgcgctgaggctgagacgctgaccaaatcctcttgccgatctggcctacttcaggtgctccgaagaaggtccagagtttcgaaaccgcgcgcaagatcccgctcgccctcgcgctcgctcgcttccctggctcggacagtatgtccagcgcagaaggcgcagacgtcacagttcttgaccgctgacctgcttgtcttcgctctagtcccgatcctcgccctctcctcgaccgatcgcaaggtccagatctggccgtacgagtctgagtcgcagcaggtatgggcgttacctcaagttgcttcgcggtcgagtcaacgttgacaccgcgcttgccgccctgcagttcgcgtattcgctgagcatggagggccatctcgactgggttcgctgcctcgattggtcgtcctcggccgaaacgacctctgcggatgcgcccccagagctcttcctcgcgagcggttcgcaggatgcctacatccgtctctggtcgctcacgcctctcgccccggccgcaagcctcgagctgaacgcggccgttggcgagaacgctgacgaggccggcggcgggctagacgagaagctctttgaggagtttgagaagcgcctgaatggcggggccggtggcggtgatgacgacgagggcggcgtcggccaggtcagcctcaagagctttgtcgtcacggctcgcaactttgacgggaggtgaggcttcccgtccttgacttcgacagcgccttatgctcgtagccagctgaccaacctctcattacgctttgcaacagctcgaggaagtactcgctcgccttctctgcacttctacaaggacacgacacttgggttacgtccctgcacttctcgccgccgtcgtcgacgacgccgcttcagcttctctcggcctcggccgacaattcgctcatcctctggacgccgcatccgtcgtcgtcggtcgaggctcctatctggttcccgcaaaatcgctttggccaggtctcggtcaagggtcttggcttcttcggtgccctctgggccggcgtcgacggtgcgcgagaggtcctcgccagcggctgggcaggtggctggaacgtctggcgggagacggccgacccggccgcgccaggcggctggaaggagctcatgggcccgactggccatttcgacggcgtcaagagcgtcgcctggggcggcaaagcaagcgaatggctcatctcggtcagctcggacgagacgacccgcattcatgcgccctgggtccgagccggtatccggacgtgggccgagattgcccggccgcaggtccacggctacccgttgacgtcgctcgcgccgctgccgggctcgcatggtttcgtcagcggcgccgacgagaaggtcgtccgggtctttggcgaaacgcgcggcttcgtcgagagtcttgtagggcttggggcgatggccgagagcgacgttggcgacgccccggtcggcgcgagcgtgccgccgctcggcctgtcgaacaagatggtctcgaccgaaggtcagtctgcattctctggtttaaaggatggaccctcgctaaagattcgcaccccgtcctgtcaccagaaccggaagacgccgaggatgccaggcaagacgtcggcttcaactacacgcgcttctcaatctcgcaagccatgacggaaccaccatcagaaaacaagctgtcaacctcgacactctggccagaagtcgagaagctttacggccacggttacgaggtgcgctaatccgaaggcactcttctactcggcagctgggtgactgatgtccaccggatgctccagttgatggccgttgcagtctctcatacgtccaatctgctcgcgacgacctgcaaggcctcgaccccgcagcatgccgttgtccggctctatgacacaacgacgtggaagtcgctcgagcagacgctcgccggtcactcgctcaccgtcacccgcctcgccttcagtcacgacgaccgcttcctcgtcagcgtcggcagggaccgcagctggcgactctatgagcgacttgctgacgagcaaggtgcgagcctcgcgccgcctatcgtttgtaaccgcaggctgacgaccgtctgttgaacataggctaccggcccctcgtggccagcacgaaaccccatgcgcgcatcatctgggacgtttccttttcgccgctcttcccggcagcctctggcgcggacgacatgctgtttgcaaccggttcgcgcgacaagacggtcaagatctggcggcggccgagtattgaagacgcaacggtctgggcaccggccgcgacgctcaagtttgacgagggcgtcaccagcctcgacttttacagcggcattctcggtgtccggtccgtcttctctgctccgattgtatctgcccggctaccctcgctgactcgacccttgtctgtaccagacttgtcctcgccatcgggctcgagagcggccacatccacttcttcaccgcgcccatctcggacgcgacgcagtggacgcaggccctcctgctcgatccgttgtgagtcgcacggctcaacccttggctttgagatcggctctcgctctgctgacacgcgtgtctctgtctgtccttccaagcgtcgcgcatctcgaggctgtcacacggctcgccttccgcccggccagtacttcgaccggcggcctccaactggcaagcggcagcgatgaccgcagtgtgcgcgtatttgagctggccctgtagacgatggacgatatattccctcatgttacgagtatctgccgggcgctgcaaaccttgatcctttgtctcttctgagtgtccggactttgaaatgttatcgaatcagacatccagaaagtcggaggcaattgctctcggccgcctcggacgacccgaacgcttcgctctcccttcaaccctcactcttctcaacccctcactcttccaccctcattacactgccccttacaatgcccgctacggctgcctcgaccagccaggccggtcgcgacacgtcgtcgtcgaacggcaaaggtccgtgacgcgccccgtctgcctcctcgctcgccggctctcgtcggccgcaccgcaagcgaggctaaccatcctcgtacatgcccctctcgactctgaccagtctttgccaaggcgtccaaggagtggacgatccctccccggccgcgaccaggccgcaaggtgcgtgtcgtaacgcccgatcggtcgcacggccgaggtggctcttgaccagggcgggccggctcttggccgacggcgaccaaactgaccccatcgtccccgtcccacttttccctcgcctcgtcctcgctttctgactcaaaggctgccgaaccggcacctgcggcgcccaaggcagctaagggagctcagaaccgtgacgctcagcgaggtacgtcgttgagtcaatgtcgcatcacaggctgtcggggcagaccggcgtctcaagctactctcactcgactggctgacgcccgactgcgctatggcccgtatctcatctagcgttccgcgagagaaagcaggactatgtggccgagctcgaggccaagatcaaagagtgtacgtcctaggtctgtgcttgttgtgcgcgaggtttacatcagaagcttgaccggctgactcatctccaccgccgccgatagacgaaaaccaggagatccagaaggccatcacgctgcaaaacatctccatcgccctgtccgtcgttgccatggcgctcatctactccagcaccggtggactgacgcccgccccatatcctgcaggaagagcgagaacgtgacgctgcggaccgacaacgaccgcctccgggcgctcgtcgttcaactcggcggcgaccctaatccctcgccagacggcaactgctcggatgcctccggctcaacgagcacgagccgtcggacccgcaagaagcggccgcgagacccggcaactacgacgacatcggctggaccggtggcgagcgtctcccaaggcggttcacggagtggctcgatcgagccgagcggccggccgatggtcagcgtcgtgtcgaccggtccgatgcctatcccggtttctgtcaacgctgcctcaccctctgcgatgctgggcagctcgtacggctcaacgccgtcgtcgccaggctaccggtcggttcaggagcttctcaaccagcctggcccgtcctcgatggccgggactccgctcggctcgccctcgaccgctatgggcggctttgtcaatcacggcccgctctcaccgcctgtctggacgccttaccagacgccgtaccagatccagccgccgccgtttgcctatcagcggacgtcgccgtcggtcttgtcgggtcccggcttcgatgtgtcgtcgctgccctcggccgcgagccttaaggcctcgtcgactcggacgacggccgacgacgttgatgtcgactgcggcttttgcaccgagaacgacacgtgcgtctgccggatgatcaaggaggatgcaagcctcggccgccggaggaacagctctgcgagcggcagctcgctccgcgaggccatcacgctcgagaccaagcccataatcccccctgtcggcccgatctccggcattgatcggcctcagcccgctgccagcactgcagcaccacttgagacggtcgccgtccttcgccggcggcccaagaaggctgcttcgcagtcgatctgggccgtcgcgcccgcgcccgctctaccagagtgcactggcgacccgtccaactgtccggcctgcgccgacgaccccttcggtaaggccttctgcgaggagctcgggactgaacccccggccgaggccgaggtcgtccagcaccaggagcagcagatcaagcgcgagcaggaggacgtgacgatgacggtcagctgctgcggcgcacccgaggcgtgcggaagccatgctcacgcatgctcaaccgacggcgcggtcgccgacgggcacaagcacttgacgctcggcgtcgatgggaccgctgtgcagggtgatgggaagatgatccccgtcgccgatgcctggcggcagttcaaggtgcgtaccctgacccgcacggccctcctcggctccagactgatcctcctaccctcgaccgacggccttcacagttgcacccgaacgcatcgttcgccgacctgtcactcctggccgaggtcgtttccggtcgcctgcccgttccagcgtctccttcggcgacccacccggcttcgcccacgctctcagcctcctcgcacgatgcaaccatgcactcggaccacgccttccctcctccggcaaagcgccgccggctcgagcttgacgcggctcacgttcaggaggccctgcggatgctcgatgcgcgcagcgcgagcggcgccggcggcgagggcgtccgcgagacggcggtcaggcggagtcatctgacgcgtcggctgagcgacctccgggggtcgctcgagggtctgcagcagcagcaacagcaggctacagacagcttgggccacgtcgccggcctcggtctcgctggtctttgagaccgcgcgtgcttgctcacgacccgcgcctcctcatacgactcctcctctgctcttttcttccggtctcttacgcgtctctttctcaccatcatccgcgcgttagtcgcggaccatccgctatctgagcctgcctgcctcctgtagcatttcctctcacgacctgcccgggtacatccctttcccactcatggttactatccaagtgtcagaccctgcgacgaggacgcgggtgatagggtgaggcatcatcgagataatggggcgaaagagggcggcacggagcgtctgcttcgagagcgagaggctggacagtatgtgtggtgtgcgcatgggggccacggccgggtctggacggcgaaaaaaatgggcggcgcggggaggcgaagcgcgggtgggtggaagggtgtccggtcaactgaggctacgaaggatgagggatgggtcgtctgcgtcgggtgaaagcgagtataagtgtgagcgtctttggaagaggacgagaggctgtcgaggacgagacgtacaaaaagcgagcgcgagccggaagccgagtctctgagagcgtcggccgctcggaaaggctgccggtgataatacaaggcggtcgaccggctcgaagaggcaggccagcgaatcgccagtagcggagcgaaggaaaagagcgaacaaagcagcgagtctactgctgctgcttgggcgccgtgttctcatcgtcgctctcggccgaggcctttgcaatgtcggtaaacgtccgctggaggaggagcggcttgcccttgttgaagtgcttcttcttggcgcccgcgagcttggctgtgcagggcgacatcatgttgtctgtcggcgagaccatcgacggcttgctggaggggatggtcggtcggggtggagtgggtcagtaggctgcagctagagagagacgggcgatgacgattgttgacggaagctctgggcctggtgggctgacgaccgttcttcgctcaggcgacggacgagcgtgctgcactcctcctacatcatccacgttaataggcagcaagcagctcggtctgcccagcacgtgggtccgtcccggcacaggcgcgtaaacaggcaagcaacagaagtgaactgacttggatgccatccgcttctggaggagggctttttggccagcgccgagcgaaggacccatcgagatggtcgagggcgagttgaccggcaggttgtgggctgaggagagaagcagtggatggctcgcgcgtcagctacgaccggtcgtgttgaatgatgcgcacggccgcgccgacgtggagcgcgctttcgcctgagcgagaggtgggtccctcggtcgagacgcttctgggcgctcgtcgacgcagagctgagcagctcgccaaggccttcgagcaggctgcagggcggcgggtggcccgcatgaggcgggagtgggcggaaggaaagggcgggatcggctggccaggcggcgggaagagggaactgacctccgttcgagccgagcggcgcctgcggcggctggacgatcgcctgctggttggggtggtggaggggcgagatgtgaggagacgacatggtgagagcgggatggagtgcgtgggtttggggtttggtgaagcaaggaggatgagggtgtgttggtcgaactgacaggctgaccgaccaacccggctcgaaaggcagtcgcgctcattcggcgctggaccgccgagatgcatcagacctttcaaagtcagtcgttccgcagcgtccgccccgtcgcgttgcactcgcctcctctccgtcgcacccacctctcgtcccagactggcccgtctggcgatgagcccacgatgcccgaccggcacatcatcgcactcgacatcgacaacttttatgtgggagtcgaacgcctgctcaacccggcgctcgtcggccggccggttggcatcaagcagaagggcatcctcgcaacgtgcagctacgaggcgcgggcaaagggcgtcgggaagctgatgggcctccgcgaggccaagctgaagtgtgcgttccttcaagcgacgcgctgcgaccggctcgtcttctgaagttgacctctttcacgtgcgcgtcggcggcaggtcccgagatggtcatcgttgacgggtccgacctgacaaactaccgcgcccactcgaaccgcgtcttccgcctcgcccgctcggtgctcggtccgacgaccgccgtcgaaaagctcggcatggacgagctctttatcgacgtcacttgcctcgtgcgcgcgcatgtcggtcggcttgacgggcccgacgaccggcgggacgaccagagcagggcttggctcgcgctcgagggcgacgagggggtctgttacaaaccaggaacgtatgctggccaccgattgcccttggtcgtagaaggcgcagacggtccgactcgctcggtctcgatcacgctcgtccacgaaacccaggcggcttcgcacctcgcccagcaccttcgggcgctcatcctcgatcgcatcggcctcacgtcatcggccgggatcgcaccgtccaagctgctttcgaagctgcttgcctcggtcaacaagccggccgaccagacgacgcttgtcgctgacgctccgccgagtgtcgtacgcgactttctcgatccgctcgagctgcgcaagctgcccggctttgggtcgtccatcgtcggctcgctcttgccggtcctcccccccgagcttgacggctcggccccgacgaaggtctcggtcgcctccgttcgccagagcctgacgctcgccgacttcaacaagctttactctccccggctcgcgcccttcctccacggcctgctctcgggcgtcgacgactcgcccgtcgtcccgagcccagagtacccggctcagatctcgaccgaggactcgtttgcgacgatcgtcaatcaccatggcggtatgcggtggaccgactttgtcggccatctccatcgcctgctcgagaaccttcttcagcggtgcgaggatgagctccggctccccgccgacgtcgtgccggctgccgccgccgccaagggcaaaggccgcgatcagcagcgctgggcgcgctaccctcagacgctccgcctctcgctccggcgctcatgggacgcgcccgcctcatcccgcgcgtcgcgctcggtcccgatgccggccggcgtctttgcgcagacgacaacggtcgcgcagcgcgtgacggacctctttggcggctcgggcgccaggaacggcgtaggtggcgttgttggcggcctcgtgcgagccttgctcggcaaggagtgggccacggatgggctccaggtctatgtgtgcgtccaagtttcgtgtgtcttcacgtgttactggctcgctccaccctgacccttgcgactgcctccacctcaggatcaactgggcggctacctcgctctcgtcgaccccgcctgctgcaccagaccagacgctggcctcgttcttcactgccgggcccaaccagccggcccgcccggcaaagcgcaaggtgccagccgaccttcatctcgcgatgctgcgttccctgccggccgacgtccgcgccgacgtcttgagcgagctcggtttgaccgacgcggatattgtcgctgcggaggaggaggaggagcaagagacgaaacgcatgaagacgggcgacaaaggcacgagcccgagcatcaaggcggagctcattgacctgacgggcgatctgtcggagccgtcggccaacgacgaggacgaggagctctgggagcagtggccggccgaagagttggccgagacctccaccgaagcggtcgcagaaggcatcgtgcgctgtcccgtgcctggctgcgacgagcggcttttcccctttgcgctgcgagctcatctggcgtatcatgactcatgagattaccctcaaccgcggccggcatagcgctttgcctcccagtcgttccagaccattttgaggacgcccttgccgccggcatcgagcccaccgccgaccatgatcgcgtcgcggtcgcgttcgccaaccatctcgcagacggcgccgacgcccggctcgagttcgcgtcggacgagcgggccgacgaccgacgacaggtcggtcaggaggtggatgtaggcgagcaggacaaacggcgcgtgcttggcgagcggcccggcgagcgagtcggccttctggttggaagcgaccgcctggaggtgggccggtacgcgcgggatcgtcttggccgtgagcgaggtgaggagccgggcgagcgccttggcctcgtcggcgccgagcggctcagttgcaacgttgagccagcctggcagcgagttggcaaggaggcggtgctggcgcccgccaagattcggtcggaccgtgcgcaagcatccgatcagggcgctcagcaaggcggcgaggtgtggcgcagagtgcaagacgaggtcgcgccggtggcggacgaggaaggtcgccgccgttatgatctggtggaagattgaccggagcgtcgacggagccggggcgatggccaccgacgtccgcggggcgagggcgaggcaaaggatagcaaggatgatgccgacgtcctgcgattgcaggtgcgaggcctgcaaaacaaacgagctcgtcaaccaatgtacacttcatgcagggcgtcggggacagggcgcaccttgtcggagcaaatcgtgcccatcgactggacgacctgcgagacgacctgccagctagccgggctgttgatcagcagacggccggcgtcgagcagatcggtcacaatcggccggttcgagactggcaatgaggtggcaggcgtcagtcctcatgaagaggcggtcaaggaggcgagaaaacgcacgttccgctccttcgccgaagatgtggttggcgcccgcgagcgcagcctcggccagcttggccggcgcagacggcgaaatggccgtcgcgataaagctctgcacaacagccgttcgctcggcagccgtcaagaccttgctgaaagcctgcaaggcagctgtcaagcgcgagacgtcgtttgctgcagtttgagaaaaggaaaagtcagaaatgggccaacaaggtcgaggcagcacggggccagacgcacattgggcgaggcacgtcccgtaaaagacaagccaggaggcggccaagttctcgatggcggccaaccggtcgccatcgtcgaccgcttgcagctgggccacacggagctcgatgacgacggaggcaagggccgtcgaaggatcccggaccgtcacagcgaggttcgtgaggttggcggtcaacggggaagctaaagcgggatatgctaggtgatcgatcagcagcggacgagagcgagtccagggaatggtgcactcaccagacgacttgacgccgagccagtgcaggaaggtcttgacagtcgtcaaagcagccgtcaggtcaaccacagcactgctcttgtccaatccaagcgaattggcctcggcgttgcggatgagatgtccgagaccctcctcgagcgtgctgcaaagctccttcacctttgcctcgaggtcgaggtccgatgagagcctgtcgacgcagcaagtcagctttgagctcgattcatcgcaggatagggagcgacatactgcgagggttcgcggatctcgtccttcatcgtggagagcagcagcagggcgctccgcacggggaagtcgatcacggaagccgagccgtcgtcttcggcgagagctttgggatcgagcgaggccatcgagtcctggaacggtccgagaacgtcctcgtggcacgcgcgctcgaccagccgaacgagctcatttttggacgaacggcgcaagatggagctgtgtacgagcgctgaggtcagcgagggaggagcttgctttgaacacaggagacgcaacgaaccggtacaagctatcgagaagggatcgggtcgactgctcgagcgattgaccgacggccgagccctcgtcgaggtagtctgacggactctggaccatcgcgtagtccaagatggcctggtcgacgacctaggaagagggcgaccgtcagcgttccattcgcatcaaggatgcttgaggccatacgcacgacgctgccgatgacgttgacctggcggaagacggtggccgagaaccgacgaaggacctctcgtgcctgcagacggtccgcgatctcttgagcgccgacacccttggcgctcatgagcttgacgacgcgctcgagctggagggcgcgctgagcgagctcgacccgctgctgtttaggcagatactcgagcggcatcgaaagcaaaaagtcgtaggccgagctctgggccgccgacggggtgccgtttgacatgtcggtgtaagtctggagagcgccgaggatatgctgccggagagtggtgagttcggcaaacggcgcctgccggagcagcaagttggtgagcgtgtgcagggtgtgcgcccgtgtcgtgctctgcgagaccgagtggtaggacgagatgatgaggtgggcgagctttttgagctgctccggagatgcccgatagctgcagaggcggtggctggattttagcaacagacgactcccttcgaccgagggaggacgtactcgatgacacccagcatctcgcctccgcgctcgaccagtacgctccaggttgcgatcgacagggcgcccttgcgccggccagactcgttatcgaggtcgctggcccagccggtccactcgtccgagtctgacaccgacttggacagaaggtagagcgtgctgtcgatgatctgctcgtggccgaaggtgtcgcgagagggcaggaggaggttgcggaggagagtcctggtctacgcagacaaagaaggggggatgtcagcgtcgacgcccaatcacgcgtcagtgcgcagaatcttacgatctcgtaggcggcctcgccgcccgtggccttgtcgaaagcgagccggccaagccggccgacatcatctgccgaaatctcattctcgactcggtcgacgacagccttgagcgcgctccataggcgcaggccagagacgaggatcatctcgcccgcccagctcgccgacgagtcgaggccaaggctgatcaagggttgcgcaacctcgtcgaggatctgctgatagaggccgatgagaccggcaagcagcgccgagggcaggttggtagtcaagagattggccgccgcaaggaggaagttgcgggcgagccgcgacaggagcgagagggtgacagcggtcgcagtggcctcggtcgacgaggctgttttggtcttgcgccgcttctttttgcgttcgccgtcgacctccgccgcggcgtcagccgatccagcagccaaggccctcgtcatttcggcaatcgccgacgtgaagacctccttgagctcctcaaggccgtcggcgatctggccttgaacgccgaggaagccagagaggcccttccccagctggacaaggaagccgttgtcgaagagtgggccgtggctgagctggcgatagacggcctgatcggctccggccgctgcggcagggatcgccgagtagagaagtgcgacaaaggcaggtagggtccgcgtctgccggtggtagtcctgcagcgagttgaggaagctgaccgtcggaccgtgcggggtcgggatcgcggcgacggcgacaaggaaccgcttgaggtaggggtccataagctcacgatccatacggccgagcgttgcgagcgtttcaatgagctcgtcccgctcggcgtcgccgttgacctgcgccttcagaccctcaagccgcttgacgccgccctcgagcaggcccttcgcctccgaccgccagccgccgctgccgatctcgccaaagccagaggaggcctcctcgtaaccgcggccgaccttgccgcggtcctcgacgaccgaccagatgcccttgcggcaggcccagcgctcggcaccggcgcccgctcgcggagcgtcgttcatgagtgtgctgagcgccgtcacgaagcgcaaagtcgccttcgagatgagatcggaggcgtggacttcggccggcgtccggaggtgcggaggcagcgggaagagcgtgagccgatgcgtcgcaagaagctgagtgtaaaagtcgagcagctccggcaggaaagagagcgtggacgatggtgccgagctgaggaggttcgccagcagtttaaagagcgccttctcctcgggggcggtctccggtgccggcttgggagcggccagaagcgccttctgcttgccgttagaccgcggaggaggtggaggcggctgaacgggcgcgacgtgcgccttgagcacgtcgacggggaagagcagcgaggagaggaggtgcaaaagcgaccccttcaggggcgaggtcgatggcagagagccgaggagggcgaccatgtgcggcagagacggcgacttgacaaccgcttgagcgatctgcgatgtcgatggcaagcgggagattgtgtcagcaagattcttggcgagacgtgtgagattgaagctgggggagagggcgaggaagtggatcagacgaagaataacacttggcgtcgtcgaccctccggagagggcctcagcttcattaaatcagtttgtgtaatttttggttgctcatcatgtcaagtcggtggcggtctcggcacaaggggagcttgtgccgccgggaggacaaattggggcagggaaaatgagacgtgagacgtaccttgcgccgtgcgaggttgttaggcaggacctcctcgagctcctcgattatgacgccgaaagcctcgttccagacatcgccggcagtcgaggagggcaatgcaagcgtgctccagcaggtgagcgcctcgccgagcaagtcgagaagtgtctccgctacattgggcgtcaagccgagtagcttgcgcgcagggcttgccagcactgccaggaggtccacgtaagatttagccggaaaatcggacgcgttgcccgagggaagacgggagctaagctgcttgaagagctgcgtcaggagcggggagagggccggggggagggcggccgccgctgcggacgagtcggccgaggacggcgcgaggaggaggtcgagcagctgccagtacttcatgctcgtcaacggcagagcatcgagaccgctgatagacagatcgtcgcacgcgctatcagtcagcgctgcaaacgaggcttcgacggacgggcgaggcagctcggctgttgagcatgagggactgaccaaaccgtgctctccttctccttacccttgcccttggcggcttgggtaccggcaccgctcatcgtctggacggcccagtccataaagagaccgcgcttggcggggatgtagaggtcctctttggcccaggcggcgagggcgatgtcaatcttggccgctggcgagagcgcaggcgtcttcaggcagcggatgagcgcggccgcggacccgagcgggtcggccgccggtgcggaagccgtcatcggacagagctcgctgctggtcgggctggaggagcgagcgtgcgtgtgcctgtcgtcgaaagatgtacgagaagggaagggctggaggaggaggccgtacagctcgactgaagctctcgctgtcgaccgaccgacattcgtcgcaaccgccggcggccaccgaaattcgagcggtgcgggcggtgtggctgagctgcccccttctggcccctcgactcactgtaattgcgtacaagtcattcattctcgctctcgggctacgcaggatgcagtacctccggcagacgtgttggtgcaagacggttatctctttccgaaggcctcggcgcaagctcctcccctcgctgcttcgctgctattgggcgcagccctgcccttcacgaccgaggtcgtcaagcctgcgcatcgtctcccctggccaagcgatataggtcgctcgctcgctgaccaacgtggtgcggcgacagattcggagtggtagtgtcatcagtatacagcttatttcggtgcggccttctcctgctcggtgtgaagaaacagacagcgatcggtcagcgccagggtcaagcagggtgacgaacgattttcagccctgcgcaccagcatgtccttcgcttcgttgatctttgatgccaggtacggcgactgcaagaaggaaggcgcaagtggtggcgatcgtggacgggaagcgtcagctgacatgcgctgcgcaggcgagacgacagcacctcggtgaacgcactccgcctcgatccgggtggttgacaatcatgatccggcggtgggcgtccttgatcttcttgaccgtcaccgggtccctttgaaacagccgggcgaagttagacgtcagcttcgtaaaccacctccggcacagcggccgcctccacctccgaccgagccacaggctgctcctcggcggacagcaccggcaagcctgacggcccagcgaaggcaaagtgcgacgccaaggacttccgccgacgacaaacctgataccgagaatctgcttggcctccttagggtccatcttggactggaagccacccttgacccaggcatccatgcccgtctttccggcacgggccgcgagccgctgcatggcgaagcggccgccgaaaccggcgccgagcacgccgaaagcaatgaggagaggggtggccatctagaggtcgactggatctggacgtttgaggggcaatagagcggaaggcgagatgtaggagagggcgctggctgtgggctgggtgagagttggtaggcggccggaggtgcacgagcggacgagctcaagagcgtccggctcgagtcgtcgtccagctcccagaacgcccgtcaacctcttcctgctcagctcaagatccacagcccttccatccttcgcagcgtcgtctaggcaccccatcttattccccacggacgattcctctgagcagaggaagagagtccttgccccactcgcgccggccagccgagcaccccgccgccgcgtcacctccgcttccgcgtcgccgaccagcccgaccgcacgcgaatcctcccccaccgtcaagcagcatgtcggactcggaggacgactttatgagcgacgccttcctcgcaaaggtcacgaccgaggccacgcccaaggtcggctcgtcgacgacctatcaggagcgccgtcggcgggcggccgcgtcctcacaggcacgcgccgacgcgagtcggatccggccgctccgcgagcgcgaagaagaggctcgccaggagggcctcaggaaaaacctgatcgaggatgagctccgcaagcgcgatgccggtggcgaggtcggcgtcggcatgaagatgatgctcaagatgggctaccagggcggagatcggctcggccggcaagatgccgccccgagcaggaccgacgcatctgcctctagcggtactcgacctggcgaggccgtaccctcagctgaagacatcgaagaggacaatgaggtcgacggcgcgcgcggtggactcggaagccgcaagcggctcaagctcgacgtgccgacgctcgaagcgacttcagcgcaacagctggagttgtcgtctcacaagccgaaggccgttgtcggccacctcttcgagccgctagccatctccatctgggccggtgcgtgaaatcctgcaagcctccagttgctgcaactttgtgctgattcaacgtcatgtcttcttcggcaggccgcaaggggttgggagcgcgcgctatggctgctaaagcaactcgagcgccacccccggcaaaggttgcgccgctcgatacggcggtctaccgctcgcgagccagcgaaggatacgctgagaagaaggctgaaggccagctgcgtaatgcgcagaagacggtgctcagtctcgatgctcgagacgacaaaggcgtgcgtcccaggaaccaactcgcacttctcgcggcagtgcgctcgctgacgctcgcctttcgttcccgtcgtcgcagttctccatcctccatctctcgccgacagacgcctctacttttccgccgccgctcctggacgccctttcgctcatcgctccagacatcgagccagcgccgaacgacgaccagacgcaggcgcagcgcctcaagtcccagatggaggcggatgcccttgcgcctcttgctgcaggaggcctcggagacgaggacgacgaggacgaggtcggccgacaagctggtttggatggcctccagatgtttcgagagacggctaggcagagggccgcagacgcacgggctgtggacgacagtgagcagggccgggaggcgacggcgtctgacgccgaagactgggtgctgctcgccgtcgaggcccgaaagctgctccagcttccggtgagtggtcgcccgagtttctctgcttgcttccggaattatcgctgacccttgcgcttttacgcctccgttactcaggcttctcagcgtctgccgctgacgctgcagtacctgcgcgacgagtatcattactgcttattctgcggctgcgcgtatgagagccaggagagcttggctgccgagtgcccgggcttcacagaggaggaccacgattgatgctctccgatcgtctcaccctgtcggccgcttgcggccgtcactcgtacgcagtagtccggagcaagagtcatgctcaagctcatcaaggcgctacgtcagggaggatcgacgagataacggcggcagaaggagaggggtaggctgagctgatgccggaggaccagagtgcgagacggcgcatcggcagccgcagccggtcggacaaagccagccccagatgaccgtctcgacatcgctgcctgcggtaccatactcgccggtcgtctcgctgcgagtcgagaaggtggcgagtggcgaccgggctggtattgtcggggaggaatcgctgccattgccgttgccggagcccggagccgttagtggcggcgtgtctactcgctggacgacctcctgctcgactgaggccggggttgtctcggccgccgttttccaccaccgctccatgcagagccagtggcctccgtgcccgcacaattcgcagccagagagaacgccgacaacggccttggagctgtggacgtcagagtagaggttcagcgtgcttctgcaggatacgcgaagaaggacgaaggacagaccaaaagcaacagacgatggccggcctcgcatcttccaggcaccagctgttggaggccagcggggccgggaggtcctcgtaaggcagggcgtgcgctggatgccgcgcgcaagacaggtaggtcatcgtgtttttctgcaatgtgagttggtgatcgtcagagagtcaacgagacgagccctctgcgcctccaacacgacgtaatcagacgtacgcggacggccgcctgaacgccagggagtccgctgtgcttgcgaagcttggctgccgcgctgtagagtctgagccgtgtgaggagggctaagacgcaacagatcagaaccgctgcctggccaagcaagccgaccggacgtacagtagtatgccgtgatgtagcgctcggcacgcgagtgcgacagtgggaagagcgctctcgtgatgatgaagatgagactcggcatctggcagttgccctgcgagcagcaacacgagaaaacggataggtgagtcaccgccgccacgagtacgcacaaccgcgaggacgcacctgatcgaggtagtcggtgatgatggcaccaagcgtccggcgaccgctcagctcaaagtcgtcgatcgtcatctgctcgacctgctgctgaaggcgcggctgccgaagagctgatactgcaggcgaagccacgtcggctgcacgctgcgagcgcaattgcgtagccagcggctgcgccgttgggaacgaggatcgacgtgcgccagtggtcgttgtcgaggcgatgaccttgggcgacgacttggccgtccgtggagcgcgagtgatcggccgggaggccgccgatggcgtttcactgacggcagttcttgcaaccgaggtcttgctgctcgtcgtcgacatgaaggatgcctggccatagcccgtcccgtacgggtcgacgccgtacgcatcgtccgacaaatgcgggctgtttgcctgcggcgtgtcgtcgcccgaatcggagtcgggcccgttcgcctgcggcgtgtggacaggcgaaaggcggttttggccctgaaactggcgaaggtacgatcgcgggtttgggtgcggcgacgattgccgagcaggcaacgaggcggagatgccgtggtgggcggcgagcggggaagagaagccgggtcgcgtctgtgatgacgaggatggtcgccgcgacgagaaggacgaccgcttggagcgcgattggcgcgggatcgggattgtctgcagctgatcttctgacgaggacgaggacgattcgatgtcctctgactcgctcgatagggtaacagcctcttcgaggtccgagtcgtcgacggccaagttcagccggacggcgaacgtatcggcgtagtcagccttgtcaccctctggcacttgtgcttgctccgcgctcgattgtcgaggtgcgacgccaacgtcgggccgtacagcgttgatgagcggcgaccgactcggccctcgctgacccgaggcgccgtttcgctcgtctccaccgctggtcgcgacgttactacggccgcgcagcggagacgtgtctcttggaggaggcaagtgaaggtctggaatgtcgtggagggcggacggggctggtagaggtacctgagcggcctcggcatcggccagctcctgccaggtgccgatcatgccctcgagtgtgcgccagacttggtgatcctgccaggcaaacgcaactgcagcaatctacatcaacggggtcagaagaggtcggacgtagtctcagtagcagcgtcgcacctgggcgttcttcttgcaaagcgccttggggtccttgcccgcgaatcgatatcggccagccaaaagggcagccttgcccgcagtatagccgtcgacaagcacctcgaccgcgacctgatcaggatcgtagactgggtcgcccatcgacttgggctccggaggggtctcgagctgtgctgccgccgctggcaacctgaaaggagggagcgcgatcagtcgtcggctgcaggagagcagagatctgacgacgaacatgtcgtcgaaaggcgcctcgccctcgtgctgccgatgggcggtgaaggtgagatggccggtcggcgtccaagtagagctcgtgccgggcagattgagaagcgggaccgagctgtgtcgtacgtcatgctggacgaccgtgcccgttttgtacgccgcccaaagagcgccatggtcgttccaggcaacgcctgacgcaaaaagaggtcggctgatgagtcagacatagttgagcgcaaggcacagagtcgcccggagtcagggtttggcactaaccgcatgccgcaccgtcaccgccctcgaggacgtgcttaggcaggtggctgcgccgcacgtcccaaatctggaccgccgacacctcctcaggctcgtcgccagtgttggagccagagagggcgacgtaaggcacgacggcgagctcggtctcgtgccctgggcgccagaggacctcggcgacgggctgtgcgcagcggagggtgcggtgcaatgggcgagatgagtcgtccatgttccacacctggcgcaggagagtgatagcagagattagttgacatcgtcctctcgtcgaaaagggaagactgacgtgaatcttcttgtcgagacctccgctcgcaatccagccgtcgccgccccctcggccgccgtccttccaatcgagcgtcatgacgccgccctcgccgtgagccgagaacttgcggttgacgaggcggcccgtacgtcgccaatcgatccagccaattgtgccgttctcgagaccgagcacgacgtgcagcgcagtcgtcgggctgacggcgagcgctgtgatcgggctcgtgagcgccggtgagagcgagtgggtcatcgctggcgtcgccgacggcatgcgaaagtcgtacagtcgcaggatcgagtcgtggccgccagtgaccatcgacgcagcagtcggcgacgagtccttcgccgggccgaagcgcatgaccgagatgggccgccgcgtcgggtcgactcggatgtcggtgtctgatgcggtgtggtgtcagtctgctacatccttggagaagaaggaggttctaccactcacgcatcttgctcggggagtgcacgtcccagaccatgacattgcccttccggccgctgacgaagatgcggctcgcctggcctggaagcaggacgagcgcaggcccagtcagttggaggcctctccgaccgatcctttgaaagctcgccacttacctccccagccccatcgggcctcaacgacaccgcttcctccggtcgcctctcgaagcccgcgcagcgtcgcgatctcccggagcgcgatgccacccgggccctcgccaatgaccgtcccctcgtcctgcccgacgtccgacggcacgcgcgaggcgggtttcggtggcgcctgcgaaggcctcctccggttgttgttgccgttgcggccgtaaggcgccgccagcggaggcgtcgtcggcgtccgggaggtcaaggaggacggcacaggtggcgcgtagttggacgtcgagaacgtcaagggcacccaatgcggcggcggcggaagcggcttcagatcgctcggcgacgtgaattggacgatgcggaggactaagagaggtcaaacggattgctaccggtcagccttatgtttctggaggcgatcgagtaaaggaacgtactgtcattgccgacgacgacggccttgccgctgccctctggcccgcgacccatgctgagaaggacggcgccgatacccgcactaccatcttcgaggcctgcctcgggtgcggccgccttacccttctggccggcaccacccttggtcggcttgatgggcttgcggacgactcggcctcgaacgtgcctgtcggcgagctgatggaggctgggctcgccgccgccgcctccgccagctccattgctgacatcggaaggatcgatcaaatatcggacgtagctcttgctccgtgggtcgttgtagataccgctgcgcgagctactggcgagagtgggcgactcctggcgaggcgacgacggcgcggacgacgccgagtagtgatacgggaaagcgtcgtgcgagaagcttgggctcggcgggttcgatgtcggcgggaacgtcgatggaatcgcctgagcgttgttgacgtcctcgaagtagtctcgcagtcgaggcatcagacccggctagtgcgcctgattcgaggcaggccggtgctgtgaggtccgcggccgaaggcgatctcggaggcgccggcagagcgatgacttgggtttgaggatggaggcggtgctgaacgctgtcgatgcttgctggttgatctgccaggctggaataggtgctggggccagctctggacggtcgttggtgggctgaaagcgtacgtcgggtcatctcgaaccggcggccgcagccgtctgccgccgagatggaggcatcgcctgcgccgcccgcctgatgcctctgaccacatcctcccttctcgcagttcttccgggtcgtcaagcagagccgcgatgtccttcgctccttgtgcgtccaactgctcggatcgcggccctgagtcgacgagacgcgagatgggtgggccaaggtcggccagctgcggtcgtctcgctcgcatgcttggccagctccggcctcgacctcgacctgctcggtgctggcctctcagccctagcgggtcacacgaggctgccccgactgctgcgtagagatcggaccacgctcgaagttgagtcgctcggctctgcggtactgccggctgaccactctgtgactgcctccgcgccccgccagaccaacctcctccggacctgccgccagcagacgacgggccgaccaagacgaaggccggcccaaagagaccgtggttcaacagggatgcgtcgtcctacctcacgggcggtggcggctaccagagtggcggctcaagcagccaaggtccgttgagcctcacccggtcgatctcccctgtgacgacccctgtctcacgctcagacgccgccgctgacgcgcggccaaccttcgcttcgagcagcccagacctcgtactcgtcgaccgcgcccgtcctgccgacgcacgccggccctttaaacggcagccatgaggacgccgcgggcgccgccaactcttgggagacgcgcttcggctggcgcgtcgacttcgaggcggccggagcgtacgtgttcgggccagtgtctggtacgtcatctttcgcctgtccagtcaagcgctgcctcgatgattctttgactgaagctcagtattcgcacgcagccctccttctcctcatcctcgagacaaccaacgagctcgtccggttccacgcctggcaatctgcgctgctgacgacgccgctcgtcctcctgcactttcttctcaagctcatcttcccggcctggctcaagctcacctacaacatatgtgcgctcggcctcgtcgccttcatggcgtaagtcccgcttcttcataggtcgcgtaccgctcgacaccgagcgctgaccactcccgactgccgccgtcgctcttctttgctagcgtccgcgcgtacacggacgccaatcgcggtctcgagcgcttctacctgccggtgataggcgaactcgccgcgcgatgggtgagcgacgagtagggctctgcatcggctgtctgcacctcggtcggtaggagggtcgggcgcgcggcgcgcggcttgcgcttgagcccccaggtacatatgcgctcgtctcctccctggccattccaacagcacgttctcggagcagcgctcgtggtcatgtcgtgaaatcagtcgtgaacggaatgcgggacgatgcggcgtgactctgtcggcggcccggctagctctcctccgacgccgttaccctggcagcgccccctcggctgcctcctgtcgaaggaaagggataagcgccttcagtgcgactcttcgcgtgatcggcttgcctcctctgcctgctcgagcgcctcctcagctagccgctccttctcgaggtcctgctcgacaattttggcgacggccatgaacctgggatggtccggcaggcaacggacgaccagacgatcagttggaggtcctgagccccttaagcgagcgagagaacgtacttggcggcctggcctccgccgaggagctgcattgcccgcaagagctcgtccatgtcgcgcatcttgctctcggtgacggccatcgtcgttgacagccggccgaggtgacccgcgagcgcgccgagatgcctaagcttgggcgccgaagatgacgacgaggcgatcatcgactggcgtgggtaggcggacgacatccggggcggttgaaggagacgcgactgagagacgcgtctgcagggttgggccgaggtgcgagaggggacgagccggctgcgacgacgacgcgtctacttcttcgatagacttatgtgagctgcagagtccgtgtcgagggtcggtctcggactcggtcgagtagaagctttccttgctggcctgtatgaggcggtgaacgtcaggaggtcgggcatgctgctctgctcggtcctctcgtccaagctgctgccccgcgcgcggcagcggcgacccccgccctggacgacctgcctgaccttgccctctatcaacgtcggtccgcctcgcctcataggtcgccggcaaggccttcgcaagactttcttctcgacggtcaccctctctacgctctctctctctctccaccccgcctgcttgtcatgaagcgcatcctgccctcggcccgtcgccgcctggcgctcctgcctgccgctgctcgcgccgcctcggcgtcggcgctatctctgccgtcggtcactcgcctccctctcattcgctcgtcggccagcctgtcgaacgccctgtctggcgtgcgggctctgtcgacgagcgctgcccggacctcgctcaacgtcgccaccgccgccgctcgagagtcacctgacgaggacgagggcgcagccgcaagcctcggaggcgccgagctcgagtcgtcggctccggagccggagcccgcagaggaggggcctgtcgggcacgcagtcatctcggccttcgacctcttctccatcggcgtcggtccctcgagctcgcacacggtcgggccgatgcgggcaggcaagtgagcccgggagtttgcccggctgccatacgtgccgtagagcagcttactgatgtcgctctcctgacctgcgcggcacctgcgcgcgttccaccaggatcttcgtgacggttggtctggacattcagctcaccctctcgtaatctctctgacgttgcactctctcctctacaggatctcgccgaacttggcatgctcgacaaggtcaagacgctcaaagtgaccctctacggctcgttggcggccaccggcaaggggtcagtcccgcctggccggagacgaagacgtcttcacaagctgaccgattccaacgtttctcacccagtcacatgaccccagaggcgatcatgcttggcctcgagggctctgacccggagacggtcgagtgcgttgcctccttctccggccgaatctgtgcctcagatgtgctgactcgctggcttctccaggacgtcgaccatcagctcacgctacaatgctattgtcgccaactcgtcgctcctgctcggcggcacgcaccgcatcgtctactcgatggacgccgacatgctctggcggatggacgccctaccgacgcacccgaacggcatgcgcttcagcgtcttcggcgagaccggagacctgctcgcgaccaacgagtacttctcggtcggcggcggctttgtcgtcaaccagcggacccaggtcgacgagaacctcttctaccgcgccatcaacaagaaggaagcctcgcccgcgcgccgggaccagacgcacggcgtcgtccaggacggcccgcagattgcgccgccgcaggaggccttgctcgacgatgagccggagtcgagcacctctggtgagggcgatccggacgcgcagcagaccaacaagagcaagcagccgccgttcctcttccacaacgcgcagagcctcgagacgctcacaaagcggcacaacgtgtgtcgccgcgttcggagcgctctgtttccgttttagcgactgaccttcattcctgctctgcttgacagctgacgatcgcccaggtgtgagtgacgagcattttattggctttcgatcgacatgcgctcaccgtccttttggaccgccgtcagcgtctggaacaacgagctgagctacatgacgtcggacgaaatttcggagcggctgatgaagctctggggcgtcatggacgcctgcatccgcgacggagtctcctcgagtacgtcgctcacttcattgctgagactagtcggaccaggctgatgcgacaatcggccatgctcgcagccgaggagatccttcccggacgcctgaaggttcggcggcgggcgccggcgctgtaccggcgtctcttcaaaggtaagctgctcttgattgtctgcaacatgaaagtattgcgtcttgctgatctgtcgacgcttcgcaaggcttctacccctcggtcacctcgcccaagccgagcccaacgccgatcgcgccccctgccgcgtcctcgactgaatttcctgcgtccggctcgactgtctccctcgcgtctggcatcggcggccggtcaccggcgtcgacctcgccctcgtctgccagccttgcggccgccaatgtcgcgcgcagccctcgggcgctcacaaccggctcgtttgaccaccctctgccggtgacgccatggaagcaggccaccttcccgggcattgacttcctgagctgctatgtccgtgctctcttcttctattctcttttgacgccgacagctgacatgacctcttctgtggaccgtaggctatcgccgttaacgaggtcaacgccgccggcggccgcatcgttaccgcgccaaccaacggttcgcccaccatgcgtcttcttccaagtgagccgccggctgatgcttctgtcttctctttgcaggtgcctcgggcgtcattcccgcggtgctgaaatacgtcatcgtacgtcgatctccctgctattgcccagcgcgcaggctgatcctcgtgtcctgccttcacaggagttcatctcggacgatcccgagcgcgacatcaagacgttcctcctgactgcagcggcaattggcatgctttacaagcgtggagcgaccatctctgccgctgagggcggctgcatggccgaagtcggcgtcgcctcatcgatggtgcgctccgccgcgagttcagctgaaagtagggcgtgcgctgaccttgtcttccttccttcggctcaggctgcggctggcttcacggcctgtctcggcggctcgccgcagatgatcttgcaggcggctgagatcggcatcgagcattcccttggcctcacgtgcgatcctctcgatggtcaggttatcattccttgcattgagcgcaattcgctcggtgcggtcaaggctgtctgtgcggcccagctcgcgatggccggagacggcactcatagcgtctctcttgacgaggcaatcgaggctatgcgtcgtgcgtctttgctgatccgctcaatctgctctgactgatccaaaggttgacccacttgtcgatttcggcagtcacggcgcgcgacatgcacctccactacaaggagacctcgctctcgggcctcgcgacgacggtccggatcccgctctcatcccccgcctgttgagcagagcagtctgcggccctctttcaaactctctcgattgcttccctcgccgaaccctcacaacgtgcacaagacaacatcctgtactccctagacttttccttttctcctctgcttcgagaatcttggacacatgtccggcaccaacaattctcccgggtggctctacccgagacgtaacaaatggcgtcatgcatcgcgctctgacggcggatgctcggcgagccagcgtcggatctgcgtgctgctcatcttcttctcgatctcgactgccggcggcaggtcgtcggccgagtcgtcggaccactcgagcggtgcggcggcggccgagatgacgtcgatgacgaacgtctgcagcgctggcaggccagcctcgagccgctttttgtcgactgaagacggaagagcgtcgtatgttagcggtggatcgatatgcatcaaggtcgatctgtcgctcacctgccgctccgccggcggtcgtctcctggctgaggacgagcgcctggacgtcggcctcggtcgcggttggcccatagacgtcctgtatcggcacgacatggtattcctcgagcccgggcctgaacagccgacagaagcgctctgtcctggcgagtcggaccgagagcggctcgagccggtccgcaaaggccttcttggtgagcagggctgcatccgagacgccgacgatgatcttgcgggtcgtgagggacagcgccgtcgacaggaggatcttgtgacccggatgaagatggtcgaacgagcctatgaagcacgcagcagtggatcagctatatgagcctcgcaaagcacgccgggtggatgggacgaaccgcccagtgcgacgaccggaaatgacgcgtgttcgtctgctgccttcgaagcgggtgggagcggagcggccgcacttcgcctcaacggcggaagcagactggatccttgcgagggcaggcccgctggcaaaggagtgtcgtctggagggcggaagccagagcagaaggtcagcccgagcgccagaaagacagacttcgacgacggccgacgtggacagacctccttcggcgcgccagatggtgttccagcggcagccctcccatctcctctcctccgcatccggccgtccgaggccgctgacgagtacatcaacctcccagccgccgagaacgtcgtccttccctttgctttggaccgcgcaagagtagatggctccgagcagacgctggagcgccttccaagggacgggtgtcgaccagctgccggccgaggggactaggagcacctggaggtctgaggccgcagaccgagagaccgcctcgcggatgggcgcgagcagcgacctaggatcaagcgaaggctcgacaggaagaacgagcaggtcgacaggcatcttgtacgacaggacagggagatgccggtcgtggtcgctgatcgtgctccgtcccgcgcagcgccggcttcggagcgtcggaggcagattcttgggcgcggaattccaaggcggtcgaaggcgcaggcgggcggtcggtcggtcggtcgccctcgccaacacacacgacacgacagaccatggcccgcacacaggcctctgacaagaagggcaagcccaaaggcggcttgaaagcccagccttcggcagcggcggcgtccgcggcaggcggcactcagcccaagacggccggcgccggcagcagcgacttcgccgcgctcgtgcgcgagctcggcggcgacgaggacgaccttgcgctcctcgccggtgtcgactcggacgacgagggtggcgaggtcatgtacagtgggaacgctccggatgaggtgcgagactagctttcttgtgaccaggtggcgaccatatcgcctgctcgctggcgtcgccgtcctcgcgctcagcagctcacctgtactcgctctgccacgccccctctaggcccagctctcgaacgagctctcgaacttcatgacgagcctcgacttctccaagtttgcatcggacgcccaggacgactctgacctcgactcggtcgcgtccgacgcagaggaaaagccggtcaagccgaccgcagccgctgcggacgacgactccgagtcggagggcgagatgatcatcgagggcaagaagaagacgaagaaggaggtcgaggaggtcgtccgcaaggagaagaaggagaacgaggttaagaaggcgcgcgaaggcgagacgctcgccggcctcgtcgagggcgcgacttttgacggcgcggtcggcaagcccaagaagggcgactacgtgcgtcgatcctggtccgatgagttcacgagcactagcctgaccgccctttgttcctcacagatcttccttccgatccctcagtggtacatgcaggacctgccggccctgccagcgacgtccaaggcgctgccgcagctgacgccgtcgctcctgacaacgctgtcggctcgttcctcgctcctgctctcggcgctgccgacgacccagccggctccatcctcgtcggcggccgacaagtcgttcctgagcaagattctgcggagcggaacgcactcggacaagctgtctgcgctcatccttctcgtccaagccgacccgatccggaacgtcggcggcctcgagggcctgcgcggcatgatgggctggaagaaggacgagagcggcaacggcggcaccgtcggccgtatgggcggtcgcgaggagcgtgtcggcgtggttcgggctgtcgtcgattggtttgtcggtggcggtgcgcccgaccgcaagctgcggtacctgcgcgaccagccgcagctcacgcacccgaatgcaaccgacgcccacctcatcgtctgggcctttgaggacttcctcaagcgctacttcttcaccctcctccaggtccttgaggtgcgttcgcacagtgctgccgatggctgtgtctcgtgttgctgaccccactcgcccactcttcgctgcagaccctctcgcacgacacgttgccgttcatccgcacgcagtcgatcggcctcatatatgtcctcctcaagcagaagcccgagcaggagcagaacctgctgcgcatgctcgtcaacaagctcggcgacaccgagaagacggtcgcctcgcgcgcgtcgtatcacctgctgcagctcctccagacgcatccggcgatgaagacggtcgtcgtccgcgaggtgtcttcgctcgtgctcgctccgccgccgccgccaaagacggccgaaaagcagaagcaggcgctcaagaagaagggcaagggtggcaagggcaagggtggaccggcagccgctccggccggcaaggaccgtgacgacggcaactaccacgcgcgctactacggcctcatcacgctcaaccagacgacgctgacgcaaaaggacggcgaggtcgccggcaagctctgcgaggtctacttcgaggtcttccgcggcatcctcggcgacggcaaggagcaggacaaggaggagaagctcgccgagaaggccaaggccgacgaggctgcgcagaacgagcgcgagggcaaggcgtaccgcaacaagttcaagggcaagggcaagggcggcccagccgaggacgttgtcgaggacgaggacgccaagatgattgccgccgtcctgaccggcgtcaaccgggcggttccgtttgccaagatcgaggactcggcgtgcgtctttccttcctgcccttggccggcgcttcggctgaccttcctttgcctcatcccaatctcagcctcgagcgccacatggacaccctcttccggatcacgcactctggaacgttcaacattgcgatacaggccctcgggctcattcaccaggtcactgccgcccgcggagccgtctcggaccgcttctaccggacgctctacgactcgctgctcgacccgcgcctcgcgtcgtcgtcgaagcaggccatgtacctcaacctcatgttcaaggcgatcaagggcgacgatagcctgccgcgccaggccgcctttatcaagcgcgttatccagatccttggccttcaccaggctcagttcatctgcggcgctctcttcctcatgggcgaggtgcgttctcgtccgctctgctcttcctcgcttccttctcgctcactcttgacggcgctcgcaggtcttcactgccgcgcccggcttgcgacgactcgttgccgagcccgaggatgacgacgaggaggagcactttgttgacgcgcccgagtcggatgccgaggacgctgagaagcccaaggcggcgccggtgaagaagtgggacacggtctacgacggaaagaagcgcgagccacaatacgcgcacgccgagaacagctgcttgtgggagctggtgcgtgcgcttgcttgcccttgacttacttcgcccgctgacgtgactttcctctcaaagatcccgttcctgtcgcacttccacccctcggtatcactgctcgcatcgcaactcatcgagggtgtcccccttacaggctcggccgatctcaacctcaacacgctcatccactttctcgaccgctttgtctaccgcaatgccaaaaagctcaaggccaagggcgccagcatcatgcagcctgcggccgtcagcgataagacgggcgtcgtcctcaatcttaagggccctggcattggcatggaggtcaactcgaaggagttctggaaccagaaggtcgaggacgttccggtcgaccaggtcagtctacatccttgaaacctgtcccggccgacgacggaggctgacctttctccgtcctggactctccatctgcagctcttcttccacaagttcttcacgcagaagaactcaaaggcccgatccatggccgaaaaggtcgccaagcgcaagaagggcggcgacgacgacgacgacatggtcgagtcggatgacgaggacctgccccgctcggcaccggccgccgcgggcgctgtcgacgatgccgtcgatgacgacgaggatgaggccaactcggatgacgaggaggctgaggtttggaaggtgcgttccgtgttaacaggatcgccggcggctgccgtcctgcaaaagctgacctttgcatcctcgtcccggcttgacacccacaggccatgcagaagtcgatgcccgagatcacggacgacgccgacttgatggaggacgacagcgatgacgacctgagctcgctcgacgaggatgaggccgccgccgccgctgagtttgaggacatgtccgacatggagtcggtcgacaccgagaacgaggagcccgtcgctgccgacgacgacgacgacgacgattcgagcgagggcggctctgctggcgtcatggacgatgcaggtacgtgcccgcaacgtagcgctttcttttgtgtcgcccctgctgacttctgccctcgccctgactgcagagtttggctcggaagacgacgaggcattcgagctcgatgaagacgaagatgacctgctcgatgaggacgagatgcccgacatcgagctgcctggcatggttgacgaggaggccggcggcaagcgcaagcgggcaggcgacgacgacaagaaggagaagaggaagaagaaggcgaagctcgtgcgtcatcggcctccgaccagtcctgcagcaagaatctcggaagctgacttcttctcaccaccacctctccctcgcagccgctctggggttcgtacgaggactaccagaagcttatcgacgacggcggtcccgaggacaacatttgagcgtggcatcgatctcacggcgttccgcttgaccttagcgtttggcgaaagaccttggctcgagaacggagcatctcatcagaaggggaccggcccaaacttaagaggggactgaacgagtgtggaggcaagaccgggggtgcgaaagatgtgagaacaaaagtggaggtgatcgcgcggcgacagggcgaggagggaatgtccgaggtgaaagcgcaaaggctgagatggagatcgtagacatcgtagagtaggtgggcggagggaaagttagcagccaagaaggctacattccgccgtaggcgtcgtcggtgtcgtagactgaccggcgagcctgagacgaggagggctcggcggaagcaggccgcgcctgcgacttttccgacggcatggataggtactgctgctccgcagggtgaggcgtgtacgacggggcaggcatgacgaccgctgccgcctgcatgggaggcgagcctagggcgtggaacttgggctgggcgtacgcattctgctgctgcgactgctggtgttgctgcagctgagccgggggcgagtgcgtcatgacgcgaagctcggggggcggcgcgggctgaggatagtaggcagcttggctgggcgtctggtagatctgctgagccgggaccggagtcgccgggtaagtgttggcgtaggggtggcttggagcgccggcaaagttcgtttgctgctggagcggacttgtgacgaagcttgcctgagacgtagactgagcgagcaggtacgagctgttggcggccgaggcccggccgagtgcccgagggtccgggaagccgtagtcgtccgtgctgtggctcgagaccgtcggcgatgagggctggggcgccaaattgaacgacggcgcaggactgtcgtcacggaggataagggtcaacgtctagtcgggcagtcaaggtgaagagtgctctacttacggcaagcgctcggtagctgcgcctccggcgcccatgccagcccgacccgactcgatcatggtcggcggacgaggcccgcctgccgagcgccagccgtcgctgcgctgagtcattgcggccccgcccatgatctcgtcgcttccgtactcgtacgcgctcacacggtcgcggtcgccgtcgggcatgtacgaggcgtaggcctcggtcgctgcctggcgccggctgcgtgacttcttgcggacgatgaggatagtgatgatggcagcaacgaagacaacgagcgcaacgacgatgccggcaatggaaccgccgctgagactaaagaagacggcaggacaagagtcagaccagtgaagagcgaggtcaagggccaggcagagagagactcacgacgacgagtctgtcgtcgcagcactgatcgtctttgcgctcgcgctggcagacgccaggttcgagcgcacagccgtcgaccggatggttggagtgacgacaagtgttgagggctcttgctcatcctgagtagctgacgaggtggcggcaatagcgacaggggtggtgcctaaaggaaaggaggcttgtcagcggccggcaaaaacggccgaaagaggtggactgacgggcaatgctggtggatgaggttgtcgagctgacgctggaagacgaggaggtcaaagtggagcttgacgacgacgatgaagaagatatgactgaggaggagatggccgtggagctcgagacggctgaagaagacgagcttggggcggccgtggacagcgtcctgctcaactccggattgagggcggcagttgttgtcggaccgacgctgtcagacgtcgcgatcgcgagagtctcgtcggcgtcgaccgcggttgcagaagctgatggaagcaaggaggaggtagggagtggtcaaggcgggcgtcagcaggctgagtgcccgagcgatcgacagggatgaatgaaagggaggacggccggtcggccggcagtgaccgcaggcaaggcagactcgcgaagcacgatgcgtgcatccagacgttactctgtacgctgcctcggcagggcgggctctctttcctcgcgcgctcctcttctccagctcagaaggaagggaaacctcggctagaagctggacggtctacgcactgcggtaggtgctaaagtcgttggtcagaacgtagcctctggcggcatgctggcggtgggtcgcgcggcgagagttgtgcttggaggtcatgctgtcgaagtacgagcttaggaaggaagagaggaggagggaaggccgagaggaggtcctggcggccgcgggcgtgaacgagagtgagagctggaaagagcggcggttccggatggaagagtcgggcggtcgaagcgaccaagataaagcggaccggtcgggcgtccgaaagagacagtgtgcaaaagggcgaaagagacagtgtgcaaaagggcgagctgggtcgggaagaaggagggcgggagtcgagggaaggcgaggtcaggcaagcggcccgggcaaaagcgcagcagccttgtgaaggaccaaagggggagccccggccggcgactaaaagaaaggggccagcgaacaggccgcttcgcctgccgaccgacgcacgaaatggcacgcccggttgtctcacgagcactcgcctgagagccacggtcagcctatgtccgacagtctcgtctggagcgctcgttgaagcggcgactacagtgtcgacatcatcgcccttgaaagcgcgttgaaacggccgtcgctcgggacaaaactccgacgtcgctcgctcgtcgcgtggctgtgacgacgcctgggaccagacgagtggaccgccgacacgtcgagcacgtcgggcgacgacttgtcgcgacaaccacctcgacggccatcacgacttgttcaagagactcgattaatccgacagtttgcgggggcgccagcgtcgacccggtcgaacgaccgaaaggctcgacagggtcgacggaccagcgaccctttaagtaggcggccgactggcctgctgacttcttctcttcttatctttgagaacaatccctcccccttcccttcaacccccccgacagctcccactcgaatcactgatcgtacgtcgcgtttgcaatgccgctcgcggtcctcccttgaggctgaccctgcccctttgtctccttccctctcgtttctctctgctctcccatcatcaccgccgcagaggtgatgtccggctagcagcagcagcactcgagcaacggcggcggtcagagccacccgaagaccggcagcgacgcctcgcgcatccagtcggctgaggccaagtcgagcggcgacatgtcggccggcggtttctctgcccgcgctcagagcgccgccgcgcacaacacgaatgccggcaccactgacagtagcggcaacactgacggtaagaagtagggggtgcgtcgggtcttttcttaatgctctgtgtttcctcgtctctgatctgtcgtcctgcttgttgacgacgcagcgtccggccgtcatccggcggtcaccacgaccgcttcgttcgaccgtcctgcactctgtctggctcttattcctatccatgctttgtccgagttgaacctcttgtccgttttcttgcgcaaagagggggaactcttgccctctgttggggcgaccagcgagagcatagcgaccagccaaatcgacctctgccggtctttacgcaaggcaaagcactgttttcatgctctccggaggcggccatcctctgtcgtctgcgataccggcctcctgcgacatgtgcactgctgctactgctgctgctgccggcagtgacgcacgtcgccttctccgacgcgccgagccgtttcaatcgcttcggccccgggctctccttgctacctgccctccaacctcgaccgccacccgacctccacagctgcccaggacccgcttgacatgcgcttttcggtcccgcgctggctggcccggcctcccttgacggcgccgatacctaccgcaccctacacgacggacgcgctcgccggcagcggaggcgcctttgcgtcgtggctcgtcgctcacgtccccgtcccgccgcatgcttgggaagccaagttctcggccgtcaactttccgcttctgccgaagctcgagcaggacgtgctcgaggtcgctcggcgacggcatgccgagctgcgggagctggagagcaaggaccggagctcggcggccagcgccggaggagccccgtccaagggcgagctgccgctcgagccgtacatggtcgtcgcctgggacggccgaggctcgacgtcgactctcaccgaggagctcggctcgctacggatcgactggcaggtccctggccgagctcccttctcgttcgagtacggcgctgcctcgccgagcgggccggtcgacctccctccaatcgagacgctggcgaaggcggacattaaggccgatccgatcgagatatacgtctgtacgcacggcaagcgcgactgtcgctgcgccgacgtcggcggtgcgctcgtcgatcagctccagaccaaggtcgtcaagcgcgggctcgaggcaaaggtcgcggtaagggagatctctcacctcggcggccacaaatatgcggccaacgccctctgttttccttcgcacaacctgctcggcaacctgcgcccggccgacgcgtcgctgctcgtcgatgccgtcgtcgctcagcctctgtcaccgacggcggccagcccggccaggcttctgccgcactggcgaggagtgacgggcctgaccaagtcggccatgctctcgctgcatgcggacgcggccgagtcgtctactggcatcgtcccgccatgggagcagggcgagggagaggcagctccggccgatgaggaggtctcgctcgtcttccgcagctgggagggtaaggaggccgagttcgagggccgcatcggcgagacgctcatggagctcggcaagcggctcgagctcggcgcgatcgagggcgtctgcggaggcgtgctagaggtgcgtctgctcactgccgactcgatctggagcgctgctgacccgtctgcttcgccagtgcgcgacgtgccattgctacctcgctccggaaccggagccagcgccggtcggggagccttcggatgccgaggaagagtgcgctctcttttgcccgtctcatcgaggccatcttccgccgctgatcgccgatgtcctgcacgcctgcagcatgctctggacggcgatggagaagacggaggacagtcggctcggctgccagatcgtcgtgagtcttgacactgagcgctcgcgcagctgtccctcgactgatcacaatcgccgtccatccgcaggtcgaccaatcgctcagcgactggtgtgcaaaaggcgggcggatcggcctaccccgctactgaggtgctgtgtgcgatggcatgcaaatctagatcaggagatgccccagcgcttcttacgcccggcactggcctcctccgctgccgctgagggttcagcggccgtcttcggcgatgcctgctctgtcgcgaccgcttgggcgaccacaggcgcgaccttctcgacctcgagcggaacggcagccgccagcacaacgggcagaggctttatgggtgctggcggttccgaacccttgagctttgcaagccgttcaagccgaacctcctccagccactgctcgcgccgcttccgggcgatctcgtccgccgcagccttgcgatcctccttcatgtagccggcgcctccttctgctccgaaccagccgagagcggtgcccttctcatagacgaagaaggcgcccagcaggccgacggcggcccagatgaccggaaggaacggcggcgtgtccttgagcggcacgtcggccggaggggattcgtcatgggccgtcttgagcggctgattgggcggaggcggcggtgatgacctgcctcgaggccgaggggttgctgagaaaaagggctttgatgaacttgccaccggcgtcgctttcggacggggcgtggtgaacctgccgctcgcagcggcattcgacacggcgcctgcgggcccagcgtccgttccatcggcggtcaggggagtagccattcccggcgctggtcgcggatgcagccgctgcagctcctcgagtgacgtccgagtaggctggctcgctggccggtactggaagggcggaggcttggggttcgagctcgatgctgctgcaggcgtcggcgagccagccggtcgggtcgtcttggccgttaagcctgccttcgggtggaatttaacccgtggcaaaggtgggacggcatccgctttgtcgtctttgggcggggcagatgggctactttcagaagctggagcagtggcggtagtctgcgagtcgggaagagcgggtcagctgaggtcgcaagcgcagcggagcaccgggcgagggcgcacggcaatggatcgcgagataggagcgagcagccgcgcactggcaacgcgcgtggacagaggcatgggcggtcttctcataagatgcgtcgacgtttgagcgaaggcggcgatgttgctagcgagagatgatggcggagaggaggcaaggtcggcggtcctcgttgtcactctcatcgtcggcggtcggcggcagcgtacctcggaggcagaatactccggcctgcgtcagcgatcggacgggcgcccaatacaaggtgcatgcagaggccggcctatgcgtcgtaggcgggtaggtagtctccacgagggacgcggcaaagggctacggaggaagggacggggagaaacgagcgagtgcgtggccatatcggaggaggctgaccgtgaatgggtcaagggaacggaggcatgcgtacgaggtgacgaaggaatgagaggtcgtgtagtatgcgggaaaagcggggaagtggcgagcgagcgtccgagtacgttcgagagagggaagaggaggggggtgggcgccgtctatccggcctcgctgaggtctggatcgcaacagcgcatggagcgtggcagccgagccgcgcctaaaggagaaggagggcgccgaggccgacgaaggcagtcaagacgagacggctcacgccgctgaagtcgacggcgaggccagcacccgagccaccgccgccagcggcagccgaggcagaggcgctgggcgacgtgccggcgttgctcgcgcgggaggcggccgaggaggcctggctagcgcctgacgaggacgcagcggaagcgccagaaacggccgtcgtggcagcactcgaggaagccgggttggcggcggcgctcgaggccgtgacgccacctgcgagcgagtagccgaccttggaccaggtagcagcgccatcaacggcgtagccgcccgaggcgctgaaggccgggagatagtagacgtcgccggtagacgtcagctgggcgaggccgacgttactggccgcatagctcgactgaacgtccttgctcgacggcgcgggcaggatctgggtcgagttgatgaagtcgaggatgccgtccggggcgtcggcggtcgagccggccgtgcccgggttggtccaatgggtgaggacgtacgtgctcgagaaatcatccggaacaaaggcgtactggagctgggcgttggtcgagtcgagccagaacgaggtcgcctggccgtgaacgtccgggaaggcagcgccgccgttgagcgtcgggaacggctgaggagttgcctgccagctggcgtctgcggtggagcatataaggaatcagggccgtgcatttaccttggctctcggagggctagatgtcgacgcacagtggatgacaaagatctcggcgctgccggccgcgacgtttggcgcaccgtggaacataatatggttgctcgcgctgcgtgcggccacaggagtgcagaggtcagttgaaggacggataggcagacctctggcgaaagtagaccgacgcacagggccatggtcgggacgtaggagctgctgtcgatggccgagtcgccgacgccctcccaggcgaggctgctactcgaggcgacgttggtgacggcgttcaggtcgagctgcgtcaccttgtccgccgcgagcgtgaagaagacgttggtgtcgtggtcgaggatcgagccggccgaagcgaacgagggcgcgccggtcgtcgattgggtcgaccacgacttgccggcgacatcgtagatgtgaacgtcgctcggactgttagcatcggcgccgaggaggtactgagatgcggagcgaagaagagatcagcacaattcacgacctcgaagtcctgtatgcggctggcctcacgaaggcgttgttaaactggctcaggtggcacgtgagggccgagccggtgtagggcctggccacaagtcagagaggtagagcacccaaggtcagcgattgggctctctcacttcgacgcccgctggaaggaggagcactcacggcctgccagaggccgtcagcgtctgggccgaaggtgctaggcgggatgcagaagggctgtcagtcaggtcgttaccggcgaggcaagagtcgggtcgactgctacggccgactcacagctgaagctgctcgcctggccgaggttgacgtcgtttgtcccgccgaggaggtacaggttccactcggcgtcgctgacggtgtagagaacggttcaggactgtcagcgtcgagcccatcgagcgagggttgcagcagcagaagcttggagcgcatggcactcgatgcgaagggaaggcgaggccgacgcacaagacggcgcagtgcgagagtgcccggaccgagctcgccatggcaagagcagccgtgagcgggagggagagggtgaaccgcattggacaagggagggtgagggtgctgtaaaggaggtcgaggtcggatggccgtcgctcttgacgaggtccggccgcgtcgacgtcggctcgatcgactcgagaatctattcctgctgcccgggcccgctcagtcttctcgcgaagtgccctccaacttaaggcttgcacggctccgctctcaacgtttgcacaaagatctgtttgctttggtcatacagttgagcgctcagggcccggtcaaggcgactgcggacgctcgaggttgtgggtggggttgatgtgttgcgttaagctaggcaaagaggttggagggagggaggggagacgatagacaggtccaaagggggacgcgcgggcggaaagaggggggaggaaagcaaggtggaaggacccgctctaggcggggacggcgccctgctcggcagcgttggcgacagcctcgagcgactcggccgggtcgcgctggtgctgaagcgcaaccttgacggcgatggcccggccgtcgaggtcctttccgtcaagcgcgagcgccttcttctgctcgtcgttgtcagccgtgtcgacaaagccgaagcccttcgaccgccggacgccaaagggccgcttgacgatccgcgacgacgtcaccttgacgccgttctcctcaaacagggccttgagcgcgtcgtcgtccatcgtgaagggcagtgaagcgacctgatgggcagaggcgggaggactaggtcagcacgcgagcgatggccttcacctccgcagtcacgacgtacaaagacgagggtggccgaaggctcgccagtcgggggcgcacgaggagcccgaggagtcttggcaggcttctcgacaggctcgccagactcgtcgtcgatccgggtcgccggggccttcttcttgggggccttgaccttgggggcagcggtcacaccctcagctccctcggcagcgacctcgccgtcagcgccctcagcggcgaccttcttcgttcgcttgcggggagcctgagagagcggggtggcaagactgtcagcacagtcgttctcaggcgagcgtcgtcccagcagcagcagggaccgacctttttcttgggcttgacggcctcgccagcagtctctccctcaacggcaacagttccctcctcctcctcgccgtcgacggcgtcctcggcacggggcgcccggccggcagcggcaccggcggtacggggcttgcgcacgcggggcttgcgctccttgggctgaggcgggcgagcaatctcgacctgcatctcacggccgtcgacctctgcagcagcggcaggaagcacccgagtcagcgactggcagttcgaaccaagctcagcgcgtgtgagcaaggcatgacgcaccacgcttgttaagggcctcaacagccttctcagcgtcctcgttcttcttgtaggcaatgaagccgtagccggacgaccgcttgccgcggaagacgacctcgcacgacaggctatataacagacaaccagttattcagttagcaactcccacccgacagggtacgggctctgggagagggcacaaaagagaggacgcacatctcgccgccgatgggctcgaaaagggccttgaggtcctccgacgtcgacttgtagctcaggttaccggcgtagacctggaagagaaaggaagctcttgtcagccgctgatctctcggcatgcggaaagcaacgtctgtgatggcgaacggccaacgacggcgaggtcgtgcatcgcgtcgagctcggatgaaaagtcggcgatggacgacgatggaagcttcggagcgacggcgagctcgtcgactcaactctgcagacgagcgctgacctcgcctgaccagcctctgctctgctcgagcgacgagggacgagcggggaaggacataccttgacaccctcctcggtgaggggggcaggcagggaggccgagatgggctccgagttctcgacgggcgccgaggcggcggcggcggcaggggcggcgctcgctttttcgccttctaagttgcgctcccttcctctgcttccgtctcctcccctcgtctaactctcaaactcctcgcctcccgtccatagacccgcctttgtcattgcatgcccgttacaccctaaaagggcactcgtcgacggaccactgagtggatccaccctcactttcctttcctcctccccgtctcacccgaggcgacgaggctttcgcggactcgtgcagatcggccctctcttggctgccccttgcctctgcttggctctctgacacctggtgctaggcagcttgtcatgacggcggactgtcccttctgtgctcgctcttatgtctccatcttggagcacatgaagagagtccacccgggacgacgcctgactgcagctcagctggcgttgactggcttgcatggctgtgtttgcggtgccttggccatctcggtggccggcatcaagacacaccaaggcaagtcaaaatgcgctggctggtctcgggctcgggcttctagctcccagcccttgtcgccccctgttgcctcgtcaggtcggcgtcgcgcgagcctgtcttcggacgggtcatcgatcgacgtccttcctgttcgtcgcccagggcatgccctccgtcgtcgagccttgtcagtcagctcggttgggtcctcttcggtgattgacatgggtcaacccgaccgggctcagacggtggccgaagaccgtccctctcgagggagctaccacggtcctgtcgcagggcgccggtgccctccaggaccaacaacgatgggacaaacgggcacgtcggcgggcgggccctcaacctcgggctccaacaacgggaggagagcggaggcggcctcttcccagtcgcggacggccgaccctgaacgattgccgtcccccgcaccagagggtctgatcgaacggttcgcttcgctggccagttgcgctaccgtttacaaaccgctgccaccctcttgggctaagccttttgtcgcggctgctgcttcatgtgcccgagcttacgtccagaccccctcggagcgggccatctttgacttcttgtgcttgcccaaggtcggccttgcgccggctctgaagcttgcctcgttgtcggaggggtccgcgggtaaggcccatctggctgcctacccgctggttgagtggccttcgcccaaccctgccccagcacgccagtcgcctctgccggctcgtgtgtctaaagctgtcgcccaaggcaagctgagcagggcagctcggctccttgcggacgatgcctcggtcgcccctctcgatgaggcgaccatccaagcactccgagacaagcacccagacgggacggccgacccgttcggctcccgtcgaggttcgcctccgtcgtcgctgcccgagctggccctcatcaaggactgcttcgcggccttcaagcccgacacggccccgggtgtctcgggatggaccccgcccctgctcggccatgcgctcgccgacccggacgtcgccgccttcgtactccttctcacacggcacgtcgcacaaggcacggcacccggccagcagctcctctgcacgtcccggcttacgcctctgctcaagtcggacggcggcatccggcctatcgccgtcggcgagctcctctaccggcttgtctccaagtcgctcgtccggcacttctcggcgcccagccagctcctcccttggcagttcggcgtcggcagccccggcggtactgagcccatcacccgggccatcgagcgtgccattgactttgacttgccggccccgtaccagcacgtcacctcgctcgacttcagcaacgccttcaactcgttgtctcgagtcgagctcggcaagggtctcctccagcatgcgcccgccctgttccgcgccggccgctgggcgtacgacgtcccgaccccgcttgtcgtctcagccatcggcggcgacgctccggtcgtccttacctcaagcgaaggcgtccgccaaggcgaccctctcggccctctgctcttctcgatcggcgcgcgcaacaccctcgccgctctcgaacggcacctcggcccgggccacgccttgctcgcctacctcgacgacgtgtacatcctgtcggaggagcccggcgcgctggactcggttgccgccttcttcgacgaacgtcccgcgtgcgggcttgcgctcaacctgcgcaagtgtcacgagacgccgctcgctatcgtcgctcaggacggcctcgaggtcctcggcacctgcgtcggccctcctgatgttcgagccgccttccttgctgccaaagtcgaggcccagctgccggccctttcgcgcctttccgacctgcccggccaagaagctctcctcgtcttgcgtcactgcttggcgagcaaccttcgtcatctgcagcgctcccttcggacggacgacctgcctggcgcgtgggaccagctcgacgaggccctgctcgagcgcttccacatcctccggtcgtcgcctcgccgcctcgtatcggacgccggtcttgtgtctctgcccgctcggctcggcggcatgggcctcctctcgcacgccgaggtctcgccccacgctcgagctgccatggccgagtcggccgacgcccagctcaaggtcgcctttgccgatgccgacgatcttgccgaggtcgaggacgatgtcgtccagccgacgtcgcagcgggcccggtgccagacggccttcgtcaagcgtcgcgagtctctcctggccgccctgccctcgactgaccgagctgtcgtcctcgacaacgcctcgcccatcgcccggcgctggatgtcggccatcccgttcgctgccaacctgcgtctgacgtcggccgaggtcgccgctggcctgtcgattcgcacgctctgccccggccaggacgaccactgctcacattgctcgcttcccaacgtcgtcggccatgacgacgtttgctcggcccgtcccctctggcgtgtcgctcggcacgagcacgtcaaaggcctgctcgcacgccatctcggctccatcccccgcactcgcgtcgcgctcgagcctttcgtccctggctctcaccagcgcacggacttgcgcgtgaccggccctggctcgttcggcggtcctgtctccgagtacgacgttgccgtcgtgtctgcggcgaccctcgctggccgtgatccgatcggctctgccgaccttgccggccttccgtcgtcgctgctgcctgctggtgtctctgccgacgctgcgccgcgtactgcttgcgcctctggttctctcctcaaccaactcacttcaactgagaaccagaagcgctcaaagtacgacggccggacgtcgtctcccttccacccgatcgtcatctcgaccggtggaactctttctccttcgactgttgctctcttcgctcactggcggggccttatgccccgctatggtctcttctctcgcctcctctcgctctctctgctccgtgcccgtgctcgcttcttcgccttctaggcgaaatcccttagccacttgaactccttctcgccttcaatgtaacaccgtctatagcgcctctgaccttctgctcccatcgcatgccccgttaaaccctaacccctaaccctaaaaaaacgaacctaaccctaaaagaaccgtcggtcaagcctcgccagccatggccagcacccgtggccggtgcccgaggtgtcgcgtcgagtacgctgacctctgggatcatctggtcaagcgacacaaggacgtcagctggtccgccgccgacctcaggggcacgacccttctcgcctgcccttgcggcgccgtcgctcggtcggaccacggcctcaagtcacaccagggcaaggtccggtgcgtcggtcttcatcaacgacacgccagcacctccgctccggcccgtcccgtacctcgtcgagctccatcggtcgcctccgtcgtctccgtcgcatccgccctagcttcggcccgaactccagctccgccccgggctccgtcaacaccagtccgtcggtcgtctgtctccgccaccgccgctgccacttcggagttcgagctgctgttgtctgaggacgagctcacgccggtccgtcggcctcgtcggtcatccgctcctccgacgccggccgactggtccttcagctcgtggtctgagtctgagcgcggcgaccctgctccagtcctcgcccctgctcctccgacctcggcctgtcctccgaccttcgagccctccgacgacgactcttcggcccctgtcgacgaccttctcgaccggttcatgtcgctcgtcaagctgccgacggccgtcaagcccctcatcggctcacaagctcggctcttcgccgatgccgccgaacgcctggcctctgccttcgtcgccaagccatcggacgagacgttgttcgacttcctatgtctgcccaaggtcggcctcgttcctggccttcgagctgacgtcgacctcaagcagcggctcgcagccttcccttccgttgcctggcccgagatgccgtccaacgccgaccgtggcgtccgtgctcccaccaccatctccgaggccgtcgccaagcaggtcacttccggtcgtctctcccgggccgctcgtctgttgtccggttcggccaaggtcgcgcctctcacctcggacgtctcagccgagctcaagcgcaagcaccctgccggacccgctcgcccctttgctgcaggcatcggcccgtctcctggcatggcgcccaaggcagacatcgtcgacgaggtcttccggaagttcaagctcgacacagcgcccggcatctcgggctggacgcagccgttgctctcggtcgctctccgtcggccggctgtgatctcgtttgtgtcggtgttgaccggtctcgtcgctcaaggctcagcacccggccaccggcttctgtgcgcctctcggttgacgcctcttgtcaagtcggatggcggcattcggccgatcgctgtcggcgagcttctgttccgactggtggccaaggttttgcttcgacactacttcaagcccgacatgcttctcccggtccagctcggtgtcgggtcaaagggcggcgtcgagccggtggtccgagcggtcgaacgggcgcttgcagacgacttgcccaagacctacacccacctcgtctcgctcgacttcaccaacgccttcaacaccgtcgaccgtcgcgaccttgccgcagggctccgcgactttgctccggctctctatcgtgccggtcgctggatctacggctcacccgctcagctcgccgtcaccggtgccgatggggcagtcgacgtgctcgagtcatcgcaaggggtccgacaaggcgacccgtttggcccgctcttcttctcggtcgccattcgccggacgctggacgacctcgttcgacacctcggcccggatcgactgctgctggcctacttggacgacatctacgttctctcgtcggacgaccaggccttggctgaggttcaggacttcttcgacggtcgcggctcgtcacttcagctcaacgtcgccaagtccaagtcacactcgctggccgacattcgcagctcagggctcgagctgctcggtacggccgtcggcggtccagcattcaggcggtccttcctccaggccaagatcgaccatcaagtcgagctgcttcggtcactcggcgacctcaagtctcagcatgcgttgctgctgcttcggttctgcatccagcaggatcttcggcacctccagcgcacgcttcggacggacgatctgcccggtgtctgggacgacctcgatgcggccctcgtcgacgcagccctccttcttcggtcctcacctcgacgtctcgacaccgacgctgaccttgtcaccctacccgctcgtctcggtggcctaggggtcctctcgcacgccgaatgcgctccgctcgccttcgcatccggctcggaggcggccgaccgggcgctggccccagcccttctactcgaggtcgacgacgacaaggccatcgtcacccagcgggcccggtgcgacaaggccttcaacactcggctcgaacgtgtcttccgtcggcttcctcgtctcgagcgcgacaccgtctccgagtccggcacggtcctcggtcgacgttggctcggtgtcgtccccttccggtcggtgctcgagctgtcggacgccgaggtcgcctctggtcttcacttccggacgctttgccccggctcgctcgacttctgcgccgactgtggcgacgctgctccgttcggccacgacgaggcctgctctggtcgtgctccagtcgctctcggtcgacacgagcaggtcaagcggctcatcaacaacaccctctcctcaaacatcaagtttcgtgttgttctcgagcctcttgtccctggcactcagcttcgaaccgaccttcgcatcaccggtcccgatggtgtccgcgagatcgacatcaccgtcgtctctctcgcctcgcaggacgctcggtcggcctctgcccgtgctcactcggacctctcgctcttgttcgccctccggtcccggaacgccgtcgacgacaccctcgccctggccgctcggaacaagaccctcaagtacgctggccgggtcgccgctcccttccgtcccttcgtcctctcgtccggcggcgcggtcgagtccggcactctcaagctgcttcacgcctggcgggatgtcctcgccccgtcgtccttctcgcacctcactcgggtcctgtctctcaacctcgtccgggctcgggcccagctcggtcgactctgatcgtctggcgttgacctctgtctggttcaggatgctggtcgctcggtcggtctagcctcttgcgctcttccgccgctcgtttcatctttcttctctttcattggctcctctctcttccgcgtttgttccgctccgtcttccttcagcttccgcttccgtgtgcccgcttccctcttccgtagctagtccctccgcctctctcttccccctctcgacgactccccttcttcgtccactttcccctcaggcagccaacccgaccctaccccgttcgtctctgtgcccgtcccgcctctccttgaccctgccttacactattcgatgctgcagtaaccctaaggagctcgttcgccaccggggtacggtcggacccgtcggccaagcctcgccagccatggcaaccaagcggggccgttgccctcgctgtcgcatagagttcgccgacctgtgggatcatctggtcaagcggcacaaggacatcagctggtccgacaccgacctccgaggcacgaccctccttgcttgcccttgtggagccgtcgcccgctccatccatggcctcaagtcccaccagggcaaggtcaagtgcatcggccttcaccagcgtcaggccatcccagtcgaacctcggccggccctccagcggttcgctcgtacccccgtcgttccggttgtccgtcaggccgcttcggccagctcggtcgcccctctctcggtcgcctcgtcctttagtgcgacctcagatctcgagctcgagccagtcgttcgtcgtgcctctactccgtttcgtcgtgcttcggtatcggttgcacccgaagtcatcctgctctcgccgtcgtcgtcagctcaggtcacacccgttcgccctcgtcgctcgtctgctcctcctacgccggtcgactggcgcgacatctcatggtccgattccgatcgcggcaccctgtcgtctgagcgtgacgaccccatacccggctcagctcttgataccgaccaggacgacctcgtcgaccgcttcctgtcgctcgtccggctcccgacggccgtcaagcccctcatcggctcacaagctcgcctctttgccgacgttgctgaacgcctggcttctgccttcatcgccaagccctcggacgagaccctcttcgacttcctttgcctgcccaaggtcggcttggtccccggccttcgcgcagatgtcgacctcaagcagcggctcgcagccttcccggccgtcgactggcccgagcttccatccaactcggcccggggtgtccgtccttccgtcacggttgccgaggccgtcgctcgccaggtcacgtccggccgtctgtcccgcgcggctcgcctgccatctggcgctgccaaggtcgcacccctttcgccggaggtcatcgaagagctcaaacgcaagcatcccgacggtccgatcagtccctttgccaccgccgccggccctgctccaggcatggcgcccaaagccgacatcatcgatgaggtcttccgcaagttcaagatggacacggcgcctggcgtctccggctggacacagcctctcctgtcggtcgctcttcgtcgtccagccgtcgtcacgttcgtgtcggtgttggccggtctcgtcgctcaaggctcagcacccggccatcagcttctgtgcgcctcgcgcctcacgcctctcgtcaagcccgacggaggcatccggccgattgctgtcggcgagcttctgttccgactggtggccaaggtcttgcttcgacactacttcaagccggacatgcttctcccggtccagctcggtgtcgggtcaaagggcggcgtcgagccggtggtccgagcggtcgaacgggcgcttgcagacgacttgcccaagacctacacccacctcgtctcgctcgacttcaccaacgccttcaacaccgtcgaccgtcgcgaccttgcggcagggctccgcgactttgctccggctctctaccgtgccggccgatggatctacggctcgtcgtccaagctcgcggtcaccggtgccgacggtgcggttgaggtgctcgagtcattccagggggtgcggcagggcgatccgttgggcccgcttttcttctctgccgccattcgtcggacgctcgacgacctcgtccgccacctcggccccgaccgactgctgctcggttaccttgacgacctgtacgttctctcgccggatgacggtgcctttgacgacgtccagacgttcttcgacggccgcggctcgtgcctcgagctcaacatcaccaagtccaagtcccacgccctcgaggacatccggtcggacggtctcgacatccttggcacggcggtcggcagctcggcgtttcggtcggcgttccttcgtgacaagatcaagcaccaggtcggcctccttcaccagctcggcgacctcaaagcccagcatgccctgctcttgcttcggttctgcatccagcaggaccttcggcacctgcagcggacgctcaagacggacgaccttcctggctgctgggacgatctcgacggcgctctcctcgactcggctcttctcatccggtcttcgcctcgacgcctcgcaacggacgccgacctcgttactctgccggcccgactcggcggtctcggtgtcctctcgcacacagagtgcgcgcctcttgcgtacaaggccagctcggacgcagccgacgccgctctcgctccggtccttctgcttgacatcgacgacgaccgacccctcgttacccagcgcatgcgatgcgacaaggccttcaacgcccgactcgagcgcaccgtccgacggctgcccggcctagctcgtgacaccatctccgagtcggccaccgtcctcggtcgtcgctggctcggtgtcgtgccgtttcgatccagtctcgagctatccgacgctgacgttgcctcgggccttcacttccgcacgctttgccctggcccactcgacttctgtgtcgactgtggcgaggcctctccgttcggccacgacgaggcttgcaccggccgcgctccggtcacgctcggtcgacacgaacaggtcaagcgtctcgttcacaacaccctctcatcttgctcacgctaccgtgttgtcctcgagccgctcgtgcccggcacccagcttcggaccgatctccgcatcaccggccccgacggcgtcaaggagctcgacatcaccgtcgtttcgcttgcctcacaagacgctcgcgcgctctcgacccaggcgcactcggacacctcgctctccgtcgtcgaccggtctcgcaacgctgtcaaggacgtcctctcggccgcagctcacgccaagacgcttaagtacgcccgcctggtgtctgctcccttccggccttttgtcctcagctctggcggtgcggtcgagtccggcggcctgaagctacttgatggctggcgcgagtccctcgctccttcgacctactcgcactttgttcgggtgctctcgctcatcctcatcaaggctcggtcgcgactggcccggctctagtgcgcttctccggcttccgctccgcggcgccgcccgctttcgtctgtttcattttcgcttctcctcattggcctctctctcttccgcgtctcttccgctccgttttccttcacctccgcttccgtgtgcccgcttccctcttccgtagctctttctctcgcgcctctcttccccctctcgacgacccccttcttcgtccgctttccccctaggcagccaacccgaccctaccccgttcgtctccgtccgcgtcccgcctctccttgaccgtgccttacactagtcgatgctgcagtaaccctaaaaggttagaacacggcctcaagtctcaccagggcaaggtccggtgtgtcggtcttcatcaacgacacgccagcacctccgctccggcccgtcccgtgccccgtcgagctccatcggtcgcctccgtcgtcaccgtcgtgtccgccccagctcaggctcgatctccagctccgccccgggctccgtcatcaccagtccgtcgatcgtctgtctccaacgctgctgccgccaatccggagttggagctgcggttgtccgaggacgagctcacgccggtccatcggcctcgtcggtcttctgctcctccgacgcgggccgactggtccttcagctcgtggtccgagtctgagcgcggcgactctgttccggtccctgctcctgctcctccgatcccggcctcttctccgaccgccgaaccctccgacgacgactcttcggcccctgtcgacgaccttctcgaccggttcatgtccctcgtcaagctgccgacggccgtcaagcccctcatcggctcacaagctcggctcttcgctgacgccgctgaacgcctggcctctgccttcatcgccaagccatcggacgagacgctgttcgacttcctttgcctgcccaaggtcggcctcgtccctggccttcgagccgacgtagacctcaagcagcggttggcagccttccctgttgtcccctggcccgagacgccgtccaacgccgacaggggtgtccgtcctcccgacaccatctccgaggccgtcgccaagcaggtcacttccggtcgtctctcccgggccgctcgtctgttgtccggttcggccaaggtcgcgcctctcacctcggacgtctcagccgagctcaagcgcaagcaccctaccggacccgctcgcccctttgctgcaggcatcggcccgtctcctggcatggcgcccaaggcagacatcgtcgacgaggtcttccggaagttcaagctcgacacggcgcctggcatctcgggctggacgcagccgttgctctcggtcgctctccgtcggccggccgtggtctcgttcgtgtcggtgttgaccggtctcgtcgctcaaggctcagcacccggtcaccagcttctgtgcgcctctcggttgacgcctctcatcaagtccgatggcggcattcggccgatcgctgtcggcgagcttctgtttcgactggtggccaaggtcttgcttcgacactacttcaagccggacatgcttctcccggtccagctcggtgtcgggtcaaagggcggcgtcgagccggtggtccgagcggtcgaacgggcgcttgcagacgacttgcccaagacctacacccacctcgtctcgctcgacttcaccaacgccttcaacgccgtcgaccgtcgcgaccttgtcgcagggctccgcaactttgctccggctctttatcgtgccggccgatggatctacggctcgcccgctcagctcgccgtcaccggtgccgatggggcggtcgatgtgctcgagtcatcgcaaggggtccggcaaggcgacccgttcggcccgctcttcttctcggtcgccatccgccggactctggacgacctcgttcgacaccttggcccggaccggctgctgttggcctacttggacgacatctacgttctctcatcggacgaccaagccttggccgaggttcaggacttcttcgacggtcgcggctcgtcacttcagctcaacgtcgccaagtccaagtcacactcgctggccgacattcgcagctctgggctcgagctgctcggaacggccgtcggcggtccagcattcaggcggtccttcctccaggccaaggtcgaccatcaagtcgagctgcttcggtcacttggcgatctcaagtctcagcatgcgttgctgctgcttcggttctgcatccagcaagatcttcggcacctccagcgcacgcttcggacggacgatctgcccggaatttgtcaaccctctggcgctgcttccacctttctgtcattgttcccgttctcgccttcgtattcttacccttcagtaccaccacaacatcgtcaacgtgctgaaacgtcgtcagctcacagcaacatcaatgacatttgctgccgacggtcaagagttcagtgaaagctcaacgttattatgctaacgctgatagtcgacgcaggaggctgacccgtacgactccatcgcgcgcaggctgatatcttgcatgaattaaacccatttaccagcctgcacggatttttgtttttcgtttatacagtaattaataatctcaggtatacggctcgttcgacattcactcgaagttgcggcgatagcgtctttgacgtttccttgacttccgctcaagccctttctcctgccagtcagcgcctgtatcatcagtgcggcgggtgcagacgtcaacaccagacaacgtcagacatgtgaggcgtgaaggacgattacgtttctgcagtgatgtataatctaacgtccaaagtcattcagtcaggccccttggatttagagtactgaccgattgaaagattgctttcaaattacgctccgttcacagttcgtttcaagtgcctgttgagtgtcttcggcatactcgcacccgtcaatcattcaagtttgagctgccactccgcctgcacgtcactgtgcagcatgcatccctgttcccgcaaaacaggtcgtcgatttctccgcttcgattcatgatatcgtgaagatatgtctcaagacggcgtctctggtgctgaagtgctgttggttcagatactaatcttgatgggcaaccatataactaaccagggcaatcgagcttcttactgatcaaattgctgagcatcttctgtgaccggcggcagtcctccctgcaaagtcacgcatgacaatagtaattactctcgattctttttcggccacttcaatcctgctgaccgggtgcagatgtttccgtcaatgatacgtttttcaaagctatgaacatggaataattcattgtccagcccgtcagacatctcatctctgcacacctgaagttataaaactgactgggatcgtacatgctgttaggcggcaatgcgaaaccgatgtgtcgggcgctaacctgcaaactgaactccgtctcttgagctgtcgcgtttctttacggtctgaatattctgatatcaatccggtcatttcctgcatggtgtcttaactttagaaagcagacaaagccgcaatcagttcgcattgcagtctctgcacgcactgaattgatttgacggtataacattaccggtaatttgtttacgggagttttgcagcagactccgcgtcaatcactagactgcctcacaggcttctctggcaaatgactgaagcacctttcaaaaggtatatgatactttgaagcattcttcatccgtaaagataaccaaagttgattggcccgcaagttgattggcccgcattgacgcagaccaaaaaccagcatcagtccaaaagaactttaatacattgtgtacgagcccagacggacagactcatttgagcttgtgccatcgggaataagactcaagtgttgtgttactgtgaagtatattttgcagcgtgatttccgacatattagaggtgattgaatgtcaatagagtttgaagtaatagggatcgggcaaagcgctgataatttaacgtgcgttgttgttgtgacaaccttgttgcgccccagatgcgatcgataagtccaatcccttcgcaaccaaaaacaagggtttcctccaggtgtctaaggttgtcatttgcccagacgtcctgcaacacagagctcatgtgatatatcttgttaactttgccgtcgtaggacagtcaaacggtagactttgcgaaaacaaggttgcactgtcacgggcttctagaaaaagatcactccaccgagcgaccgtttgtcacaagtcggaacggaacgcctgatacgtttaacctggagaatgcgtgggctgtgtaagctcgagcccgtcatttcggagtcgaagctgagacgaagccgccgttttgtgcgccgtgcgccgcgggtgcaacgtcgagaattgggcttcggcttcaagcaggaccctagtaatcgcatctggagcgagccaatttgacagtgcaaattttttcgcgcgcgcttgttaataaacgttctcgagcgacacgttttgtgcactttgagagggacggtagcaaaaaactcgctagagatcaaccctgccgacagcttctacttgacgacccgttagaacgagcgcaaaaggaacactgtctggtatctttgcgggcgctgccttcgctcgagcccttatcagcagcagaagaagaagttcgcttgatccactcaaagcattccttttctgaccaccatgccgcatccccccaaccctctcgggttaggcgtgaccacagaaggtgtagtatgactgtcctagccctcacacaatgctagctgcgttaacgctgcacagatagatattcaatcacatgctgcaaatgctcctctgcgagaaggagggcttcttcagcagcgcccgggtgcctgcccaaggaagctcgcaatgtctttctacttctctaccgcaacgcggccagtgtgcgcactttaggtaacaggttcagcgagcaattgaaaacgaccaggaacggctcgctcaacggcaattactgctactcactcttccatcaccgttgcgaacgccaaccaggtcaccacgacggaaatgatgtaataaagggacaagtgaagtgccttacttgtacgggcaacttattcagcagctttgatctcagatcacgaggagctagcacgagcgaatgatccccttgtctcttccagaaagtgggtactgcttgtaagggcaacctgacgcggcttgcaaaccaccgttacgtctctcacacatcatcgacggccgacagaaaaagaccggtgataagcaggcactcacgtcagccattgaagacatcaagaagaccaactttgtttcctacggatgagcctttggtcgtgggcagagctttctttctattcttcattttgtctgttccggagttggcgggatgctcgcatccggctggagacagacgacggcgctttgaccttcgcccgtctcggtcagggcaagcatggctgaaatcaacaggcagctagctgtcaaagggcaccaccctaccaattcccaattttgaggtgcgtacatcttgacgtaaagcagcatatgcatgctgagctaacctgtctttctgcgctggctggcatccgcagcatgtcgctctgctcgatgatctacaccgacaaaacctcggcgagctctcagttggcagctcggcgtccgtaaaactcacggccaggaaattttgggataagaggtgtcgacccgaggtcgagttcccgcccctctatgggatagagtcggtctggcggtgcagacatattcacctttcctaggttgaacatggtccagcaagccattgccgaaagtaacggtggcaatggtcaggtagaatcctcttcatcaacgcctctagtctgctcgcctcagctgaccccccaccttctgaacttcgtcgcgcggttcgcagccctgggaggctccggtgccgactcttttgcggacttactcttcgaagaagccaccgccgacctctggccaggcgacggcgagcgcagcagacgttgaatttccaggacctggccgccggctgccccagtgcagcatagcttttcggctgcataggattgcctgccaggtcgggaagtgtgagcagcgagtcgtcaatgagcggcgcgaagtaaaggttgcccacgcagtgacctccgggcgctccagcgcggcccgacggttccccgagacgcgggataggaggatggtactggagtccggtacgccgacgtctagtccttgctcggggtctcgaacagccgagcaagttcagcaggccgagcagcaatgccttctccctgaaggcgttgggcttcgtcctgttgaacgggacgctgaggggaggaaggcggggggtggccgtttggttatgggcagttggctgcgggtgcagccgcgtgaccatttcggtcggtgagaaggcgaggaagttgtagctgggacgtgcgtcatccagttgggggtaggcggggggcggttcgccggctcggcgacccaatctagggcggtcgaagttatcgcggtcggccaggcgttccggggggagccgaggctgacggtaacgcgtgaaggaggagcaaaagattgagcgagggcgtcatagggcgttcgtgtcgtcaggtcgtcgaggtcgcgggttgcttactgtctgcgggtccaggccatctaaggatgctcgtcgccgcacatggagagcaattggcaccatctcagccgtttaagatcatcggggtccgggccaggctctaggcctctcagcgcggcgagtgacggacgggtactgcaacaccattatccgtcctcgtacaatcattttcccgtccctttcatcaccaagattgaggacttgatcctgacctcggcctcgctcttctacgtcagcgggagggtctatcggaagcagttgtagccatcccaatgaccaggaggtacgtccgttcaaaacggcccttggaggcagcataaactgactttagcttcctcgtctgcttgtttttcaacataggaaaggacgctgttacgagcttaccctgtatgcagggtacgcagacttcggagtaacagtcagacaacgcagcgtacccgacgtcgttaagattcccttgcttgtgcagagcaactggggccttcgttcctgggtgctcaagctggcaatgcgacagctcgatggcgtcctcgacgttgctgccactcgtcaaaaaaagggttgccagctcgagccccggaccggctgactgctcgatgcgcacgtcgagcatgtacaccctagcgtcgtcgagttaccgacctttacgttcgaatgacggctgaccagaacgttgcgccgttcagacagggtccatctccctgcaagcttgtcgtcgatcgcgcagcgtttgaggccgaaagagggcgtgttctcgaccgggcctttaatgttgtcgaccacaggcgacggcagccttcctgccatgctcttgcccttaccccaagcggcttgatcttgtcttgtatgcggctgtgaagcctctcgtcggcggcgctggcggtactccgactaggagggccagaattggggacggcattgcactcgagtggatcgagacaagggtgggcttggtcggcgggcgggcgtcgggtggcaaagaacggccgggttccttagccggcgtgatcaacccgtcttcggccggcgacttgacaaccgcgcccaactttctttcacatgtctccacgaggcatttggctatcagagccgtcgccttgaagtggtggacgcaaaacgccaagcatgagtattccacctccatttgcagcctaagagaagcggcttgacctatctcggtctggcgtgaggccggcgggccccagacgcagaagcggtctctgtcccgccgcgaggctcggatgacggccttcttgcgaccgctcatatctcctcaattcagtttctcttagtggaggttgcatccgttcagccgttgcgcagcaacctgccgcgagcactcaacgtatagctcgcagacgccaacgacttagaaagcggttgggcccacagcaatgtcaaacagtgactgagagtcctcaaaatcgacacaattgaggtggacctgtgtatgatgaatgggtcggccgattagggacggttctgtcgttagctgacgtcttcgctcatgacttccgctgctcggcaatattaaaccggcagagaacaaatgtcagctcaggagcataaccatgcggaccatatcggttcgcaatcacaggatgaatgggagtccggacagcagcagcaagggcattacatagtcagcgggaggtgtaacacggtctcagacactactcgcacgcacctgatctgcaggcgagagtgcaatagagccccacgggtcgacatcctagccgagatgtttttcgtccgatgatcttcagcatcgtgacgcatcttgagccgctgggtgaaaaggttgagtgctaagggctcggcgtgggcgtagacgtgtcggggcctgcagtcggctggtggattgtccgctgcgttgttgtcgcactcgcttgggtcgcccggaaatggagagtaaagatttgctcgttccaacgatccagagagggctcaccaggaagccggcgaatgcgagggcgccgtggtcgactcaaggcgcattgtgcatgcttggaaagtagacgagagggtcgtgcccttgcgctgattggacgtggtgaagaatctgaagtaggggatcagaacgagtcagcgtccctcgaggcagccgacgaggcagaacgcacccgggtgcaggacgtaacggtcatcgggcgtcctgccgccgattgagttggcgcgggcgaacgaacgggcggccgtcgtgacagagttgctaaccacctttcggaaccaaagatgacccgccggcgccggggcggtgttgcccggctcgtcagtgatgttttggaaccaccattcggccatcttgttgcggatctggcgcacgcttgagtactttttggccggcgcgccgacgccgaactagccgagggtggaggaggttagggttaggacgaatttcaggtcagtcgacctcgccgagctcaaagggaaaaggatgcacgatgagccgccggctcattgtggcctcccatcggctgcgttatggtcgaagagcttctgctaggtgtccggcgggggatcaaagagcttgaaggtaccagagtctggtgaaagccctaaggatggtgaaaacgatgtcagtaaggccgcacggcgtagaagagagggggacaacgtacaaggcgagagtccgatgcagatcagagcgccggcattgcggtttgccatcagctcggtgtcgttgcgttaggtggtgaccgccggtggctgagtctgcgaagctgagggcgaaatagagataaggcaggaggaggaggagcaggcaatttagctcttgggatataaatcgagcctgccagacagcgggctgccgggggccggcgacacgagcactgccgcatgcctgctgagcgggcgggttgggaagaggctcttccgatacgaggattgactgcagctagggccaggacaagcgcttgcggaagctgcaactctcatacccgttgttcttctcgctatcttcgcctggggttgtgtcactctgcggcccgagacgctcccccccccccccctaccaacgattggcaaaatgcaaaaagttggtcggaaacttgagatggcgcgagctagaggcaagttttaaaacgtttttttttcttatctcgcacttgactggcctgagcatgtgcctcgcttgaagtgacagtgcgcgaaaacgagcatgctgacggcgtccaaaaaagcccgaggcagagtaagggtatacttgacgagctcgccatacatgatgacgtcggctgcaaggagggagacaccgtgctggcaatcgatcgttgcgatgccgttccggtcgaacgtcgaacgcgttccaggctgggcaaccgacagcgtcctgccagcgtctgccagggcagcgcccagctgtttacgttgcggtcttgtccgtgggtctgggacgagtagcagaggggcaagggtcaaagggtcatcggggacgccagaagagagcgcaagtgtgagtgcaacgcacagaatggccgacgacgcgcaacatctgctcaacctgctcctcgtcaaggaataactttcgctgatgcagacgaaagctatattgcctcgccttctgcaggcgtttaatggagagttcaacgtcggcacacacgtgataagactgcatggtgacggcctagtcttcggtggcgagctgcgcaaagcggagggataagtgaggttcaatttcaaatatcatgcaggaaagaaggcagcgtgcccgtcctcccaaaattcgagagcgcccagcctgcactcgccaagcaacgggatccgcccctcagctgccggctccaggtagcgcagggtgataagccgatttgctgggtcacaccgatcggagccaagccgtcgactcgaagtgcgcgatgtggagcgtgttatgatgattctgactgacgtcagactcgaggccgatccagcagcaagtcatgcaaagatcgactggagctatcaattggaggctgcaactcagtcgatacggaagaggcccgactcgcgcttttacgcttcgcacttagagagcctgtctgtcacgcgctggccgaacatcttgaatgcacgagggaggggaggggtcgagaaggatgacaagatgctgggcagggttggtgtgggcgggccacaaagtactggttgttggcgaagtgggcgattgagatgagctgcttcaaatcgatgctcgagagaacagactgattgcgccagtggtagacaggtggcgggtcagcactcatgcgatcaagcgagacaggcaaagagcacgcgcgcagcgcaccatcgtctgggtccaattcgcctcgtccttccttccagtgagagataggccgctcatgatctggacacggacgggcgcatggctgccaaattacgactcggatcctctgcccaccaaggacggcatccaacgcgtcgtcacaggcacgatcgcatcagctcttcctcagaaaatgtgcgttggcctcctctgggaagactaacgctctgtcaggcggactgagagctgaacagaaacctacgcagcgcctttgtcatcgctcgcccggggtcaggacctcgtccgggcaggaccgcggcggcacgtacctggacgtcatctttgaccacaaggtcacgtaccattttgccattaacagtcttgagttcgccgaagagaacaagttcaaggggtgtggggagtctgcaagcagtgggcctcatgcgtcttgagccgaccggctgtaccagtatcgtcgtactggtacagtattagtaaggatacagtggcacgccagtacacccccgccgagccggtacatactagtattccacccggaatatgaatcggtatcatattagtaggcaaactgtcatggaactggtatggccaccggtacaaaccagtatatgtgtcggatgacctcaggatgatgcactaggttggcagctgtgtagccataccagtgtcatacatagctgccgacccggtacagcatcttgaggtcaatctgcgcatgtacttgcatgccataccagcatcataccattaggcctactgatgtgataccaatatgtcataccggtactgggactggtggggtgttagtaagcatacaagtaccctaccggtaggacatgctggtatgctaccggtatggtcccgccagactttgacagcctcccatgagcgcaaaaggaagcgaatgtcagcgggatttgatgagcctggtcgacaaggtatccggaagagttctaaggggttagtctgttgaacgggcaaaagaagtcgataaaaacctttgcgcatcatcccgctgacaaagcccgcgacccgcggtagatttatggcctcaaggagcctgaacattcacggcggctcgggcggcggcaagaaccgcctcaagtcgcacgtccaagaaggacaacaggcctcggagcggactgcgcaaagagctcatcaagcgggccgtcctggaccacttggcgctacgaaccctgcgcagccaagtcgagaagtatgaccaactatcgcctagctctcaagttggtccgaacggtccggagctgaccggctgttcctcccacaaatgagacgtctacttcttttgggctgtcgacccagtctttgcgcttgagcggttccgctctcgtgcgctcgatcagcctgaaggacgagtgggctcgacatgggctccatccggtcgtgatgtgctccttgcaacaaaagtacctgtacgtctgcatgcagtccccgtagtcttttttcgcacaggactttctctgcctgacacttgtgtcttatcctctctcgatcacgcaaggcgcagtcgaggccgacgccaacctcgggctgggttgcatagggagctcgacgcatcggttcgtgaacatctacggtgcagggccgaggcgctcctgcgttaccgctgtacgatgagcccgccgctctcacggaccaagacgcaaccgaccgtcgaaaaacgaagacaaacacaaagcaggcgacgcgccgacgctcgcagtcgcaccacccgagtccacggccgatcgccgccgctcacgcttctcgtcgtcggtcgagttctagcctgcgccgccgcctgccaaggatcgccggcttttttcttcgccggccacagacgccgtacccggagtcggccgaggaagggcgggttgccgggcggaaaaggtacgcttggggagtagcccggcttggaggccggcagctggggaccttaatggcttcgacagcgataactcgctcggactggccgatctaggcggcgacgccgtgcggtcggttgaaactagcttggtccgcatctgggacaaccgaggctatggctttggccgaccgccggcggccttgctgcgccgaaacaggctcaggtagttatcgttccggcggatcggcccgattctgtttgtggtgagcctggcttcgtcaccggcgcatcaaatactatcatcgaaatcgccgccgagctcgtgcacgcctgcggcggcacaatcaataccggacatgacatctaccggcggtcgctgctgtcattaggcccgggaggcagagagaggttctaaatctggcggctgtgagaggagcgtgaactttcggccaggcaaaaaaagtcacgcagggtttacggatgactaaaacatcacgggggagtgagcgctggccgcccgcagcgcgctggcgctgggcgaccgccctccaaagcgctacgactctcccttttgaacatcccctcccgtgctcaccacttatattgagctccctttgcgccggctgcccgcgagacgaggatgagcgcagggaccaatgagcgacaccctccgcattactgcacgcaacgtgcagggtgggcttagctcgccagggccggggacatatggcttgtttccttcattttgatctctcttcttccgacctgtgccttttcagcgagatgcgccaaaagactgcgcatgcgcaggcggccgacgtgcgctggagtgaggacgcccgctcggtcgggcttgatgagctctttcgaaccggctcacagaccgtcatcttctggcgcagtcatttccatcttcttccccttcagctgactgacatctaccaggttgccagcacgctcggaggcgatctgttccagcccaagacgtgcgccgcatggacgccgtctttggatttggcggcgggccgttagtttacaccccagacgacctggtacatatttagacattgtccagcagatgtactggaaagtatcatatcaggtaccatgttgttaaatcatcagtagccatcctggtagcatatcagtaggccttccagtatgttttcaacctttctcacccgatcaacactaactccttcagaagtcgaccgaatatctcgtcacacgatcacaagtaaggacatccgctttgttttggcgagtggaggtcaggatgtgttacaagcggtgatcagaggagcagaaaggtggaactgacatcagtcaccaagaactggactgaggtcttgacaggagggagggaagcggaaactggagaaagagaaaaaagaggcaaaatgccgatgcgttccggctgctagcgcgcgcgcagccagctgctgccaccctcccctcactccaacagatcgccacctcgacttgtttcttcgtgctgtcgatgagcttgacaaaagatttgtagtcttggaaaagttttcgaattatctttctccgactctgcactcttcgacttctcgatccaaagcatttggggaagtcggtgaacgaccttccgtcataacggcatcaccctgcttgcagcggtgattcgcgaaacgagagtcgttgccctttgtttcggagtcaatgcactgccgagacatcagaaaagtcagctctcagtgtgtttctgcctcttctgttcagcccgtgtcaaaaagaatgcgtcgtggcggtttggtgggcggcccccagcgccagcgcgccgccgcttgtcagcgccctctcctccatatgttcatgatttctaacccctgcgtaacctttcgaccacccaacatcccctcgaggggttttgcttcgtcaaaacttcacgctcctcctacaccttgattaagccttacacctagatcacatcctctctctcccttccgcgccccttcctcctctcacgccaaagagcatcgattgatcttaagcattcacccgactgtccttgccctcatagttccagtcacgctgctcgtgaccctccgctaccgaggcattacaggcctgccggccatcgacggtgttaaggccgagccgagactgccgatctgggaagaggagggtaagggcggggtttgggtacgtctggcctcagcgcggcggcgcgcgaggcacgttgaccgacattgcccctgaccctctgtcgtctcagcacggcatcggactgtgcgaggttcgagacggcaaccgctaccgagtcgagtcgcccccctatgtaaccttcaacagtacctgggcatctatcgacagtcaaacaacacctgttgctcaagtcaggcaacaccgattgatccccaataacccccctgatttaacgggacggctgaagacaatcgagacccttcctccgattgatcgaaagcttccgccaggggtcgatcaaacaagagacgctcctcaatcaatacaatttgccgtaaactcccttgttcagttgacactctagtgtgtcgatcattaaaaccccaattgacacccatgattgtcgctccaagggggggggggggttcctgacatcgacccgtccagtaaggtggcgtccgccaatcccgggactcgggcgcactgtgccgacctcgctcggcagcaccctctcgtccctttggtaggatctctcgcgtcattcgcaaagcgcatcttctacttcatcattgtcaccggtgtcgcctacgcatgcaggacgcaccattgacccctgcgcgcgttttgatgaccataaccaaagcatcaagatgcagagcgagtcaacattgctttaccgtcccagcctcggagtcgaacgacgagaaactcggaggtgaattcggaggtcgagcccgaggtgacgatcgaggtgaccttgtcgatgattggaagagcgcgagggtaagtagtgctttcaacgagtgcatatcggaaatccttgcttccggttgttctcctggagggagcatgttgacattgtgtagatggaggccgcgcgaaaggtccatggcccaaccctcagccacgaaccgaccgcccactcgagaaaggcctgcgcgaggggagagaagaagggtcagcaccgtatatgataagacccagtctaaagggcttttgtagtcttacagagtttgttttaaagccgcccgtagcgcatgatgagcaatgccgcaagccgccgggccggcgcagcatgtgggcaatgaatgtctgccctcactcgccagaagcgctcggctgataggtgtagcggtaagcacatcgtaagatcaggagtgctgttgcagctggtgctcatcaggcatttaagtacttgttgagcgaaggacgaatgggaatggactacctcagtcaccaagaagtggactgtacatgagacgaaggcacttcagctctttcagtgaccaggtaggtcaggagagctgctggtgagagaaactaaggcggccagcgttagtgagtggaaaggagaggggttttgaaggcacgaaggggtatgcaatagccggatatttgcctgatcataactgtaacttttggggtatatgtattgtctgatgactcttgaccggttggcgcagtggtagcgcgtctcctttacactcaaagtatattcggaaacggccgccggttcgaccccggcactggtcagaatctttttggccgcaccgtctgcacgtacacgtgcaggtcgcctgtctgcagcttctcgctgcttaaacagcagcccttgaagaatgcaacgagatgctaattgtcaagtcgtgatgtcgtgcactgcccggccgggcgcgtcggccgacgagggccaatcgaacgcggggcgaaagtggcggccgacgacgacgactgacgacctctccttcgactagcagcacccttccttcacaggtctcgcgctctccttcgtgcgtagctctggccagtttgctccagatgtaaggtcacacccgctaacgcccttgtcgcttgcccgcgcccggcaggtccgagccatgctggtcctcgtctcctccctccgacggtcgttcctccggcggtcgttcgcgaccgcgacgagctctccccagacgctgatcgagaagatcgttcagaagtacgctgtcggtactgaggagggcaagaaggtccgcagcggcgactatgtcatggtcggcccagagcatgtgtgcgtccagctgctacggagagctcgcgagctccagctgacacgagcgtgcgccccttcccgccaacagcatgacccacgacaacaccggacccgtcatctctaagtccgtccgaggctgttgctgctgctgcgacgtgtacgctcgctctcagtctccagtcgctgacgtcggcgcctctcggctcgctgcaggttcgcctcgctctcgctttcctcgatccatcggacgtcgcagcccgtcttcacgctcgaccacgacgtccagaacaagtcggttgccaacttgaccaagtacgccaagattgaggcgtttgcaaagtcgcacggcatcgacttctaccccgccggccggggcatcggccaccagatcatgatcgaggagggctacgcttggcccgggaccatggtcgtcgcgagcgacagccattcgaacatgtgagccctgctccatctccctcccgcctgctgcgacgccgcttctgaccggcggtgctcttcttcttcttaggtacggcggcgtcggctgcctgggcactcccattgtccgcgtgcgtcccgggtctcgcgcatctagccactgccctgcttgtcctctgctgacacgttacccttcctccagacggacgctgccgccatctgggcgactggccggacctggtggcagatcccgcctatcgtcaaggtgaccctgctgaaccagctgccggccggtgttactggcaaggacgtcatcgtcgccctctgcggcacgttcaaccaggacgaggtcctcaacagcgtcatcgagtttactggcgacggcgtcgacacgcttagcgtcgacgagcggctggccatcagcaacatgacgaccgagtggggcgcgctcgccggcgtctttcccgtcgactcggtcctccgcgagtggtacgagaagcggatcgagaagtgggaggtcgagcgtctggcggggtccccttcgtcgtcgtcgatggcgcccatcccgatgcctgccgccagctcatcgtcctcgacgtcgtcatccgtcctcccgccaccggccgagcactcgcgcatcaacatggagcgcctcggctcgctcttcagcgacccgctgcgagccgacgctggagcccagtatgcgtcgcagctcactctcgacctcgcgactctcgtcccgcacgtctcgggccccaattcggtcaaggtctcgaccccgctgccggtcctcgccaaggacaatgtcaagattgacaaggcctacctcgtttcgtgtaccaactcgcgcgcttctgacattgctgccgcggcagctgtcgtcaagggccgccagattgcgcccggcgtcgagttctacatcgccgccgcctcgaccgtcgtccaggctgaggctgaggccgctggtgactgggccgcgctcgtcgactttggcgccaaggtcctcccggccggctgtgggccctgcatcggcctcggcacgggcctcctcgaggaaggccaggtcggcatctcggccaccaaccgcaactataagggccggatgggtcaccccaacgcgctcgcctacctcgcctccccggccgtcgttgccgcctcggccgtcaagggcgtcatctgcggcccagactcgctcgacttggctgccctgccgcaggtcgaccggccgacaacgagcttcgagcggctcggtgttcaggccgtcgagagctccgctgagggtgccaccgctgctgcagacgccgcccccgtctcggaggccgtcctcgagggcttccccgaggtctttgccggcccgctcctgtttgcgccgcaggacaacctgaacaccgacggcatctaccccggaaagtacacgtgagtcgccgtgctgtgggctgcgccatgtcagatgttgaccccttcgcacccttctgcaaccagctaccaggatgacatcacgcccgagcgccaggccgagggtgcgtccaggtgcacttgatccctcctcggaggctgcgctgacaagccgtgcccccttctcgcagttgtgatggagaactacgacgtctcgtttgcgtcgcaggtcgcctcgctgcggccccagatgccggtctcgacggccacccgccggtcgggcggcatcctcgtctcgggctttaactttggcaccggctcctcgcgcgagcaggcggcaaccgccctcaagcacgccggcatccccctcgtcgtctgcggctcgtttggcgacatcttcaagcgcaactccattaacaacggcctcatctgcgtcgagtcgcccgagctcgtcaacgagctgacggctgagtttgcgctcgacggcgcccggggcaagggcggcaaggacggcgagggcaccgtccggcccgggtgggaggtcgaggtcgacatgaaaacggccctgctcaaggtgaccaagagctcgggcgagagcaaggcgtacaagattggccgcgtcggcaagagtgtccaggagatcgtacgtcgcacttccttccgctctcgctggccagcctcgaggccatacgctgaaccgcgcgcctctaccctctccaccggcctcgtcatagtgggttgccggcggccttgagggctgggtcaaggcccggatgtgatagagatggccctggctgagacatgcggtgggcggccggtcaggcgcgctgctcgagcgcagagtctggtccgctaggtcgcaaaggagagggtcgggacgttgcgtgcgaggaggctaccggccctcgatgccgcctcggacccggataaagagccagtcgatggcttcgcgcacgcccgtcctgcgagcagcatcgtcaggtcagtacgacgctcagttcctacgcaaacgcacatggcccggccgcacccttcgagggccgagatgccgagcacctcgagactaccgccgcggccctggagcccgccgtcgccggccgtgctcgaccggtgggcctggtaccacacttcgtacgattcgcggatatcagccggcgagagcgagcccggcagatcctgcttgttggccagcagcaggagcgggagatcctgcgtctggggcgaggctaggacctcgtctagaggaggagggtccgcctgcgcgtcagcgagtgtttgagctcgagtatgcgcctcagccggctgcccggacgcaccaaagacggtccaaccctcggcaagccgatccttgtccgaagcgtcgacgacgtagatgacggcctggcagtcgtcgtagtagcggtgccagatggaccggatgtcgcgctggccgccgaggtcccagaactggaggatcgttgacggtagaacgattttgccgactgcaaaacggtggcgggtcagcgtcaggtctctcaagcacatcaggaggctcctcgccgcgcttgaccacgcacctccctggccgacggtcgggccaatcttggccgggtcgacggccggctggttgggcaggtagaggtgcttgacctgctcgagaaaggttgtcttgcccgacgcgtcgaggccgatgatggcgagcgagaactcgtccttgcgcgtcaggtacgtgtgcaggcctgaaagcaggtggaacatttcgacagctgtgagcggtcggtctgctctcgggtggtgcttctgttggtctctctcgtcgtcgttgtcgaagggctgagtcgccaacgcgttcgcgcctcgcggctcaagaggctgcctcgcagcccctgcgacgctggctcgcctcacgaaagctttactgtaaggggcaccgcagtgggcagcgaggtcagaattctcttctggcatctagcttgcgcgtctggacagaagattgcatcgagaggtagcctgacaggccgtccgtttgcggtgcctgcagcctgtctcgacgcttgctgcgccccaccacccgaccatcacttcgaccgcctgtcaggtcatccctggtttctgctgtctcgcgacagacaccgccactatcagtcgagcgctcttccgccttcccagccgcctcagctcgatgcgagccatgtcttggtcggacgcgctcgtcaagtacgcgacggtcgcctcgccggcggccgacatcccgccagacgtctacgttctccacgacgaccacttgtacgtcgtcttcccaagcctcggcctccaagacattcggagcctgatcttggtctggcctccattcagtaccctcatcaaggacgcctatcccaagtcgtcttaccactgcctgctgctcccgcgagctcccttcgcgctccctccatcgccatcgggctcgccgcgatcactcgggacggccgagctcagctcgctccagcgcgtcctgacgctgccaaaggaaacgatcctgcacgtgcttgacctgatggaggagaccctcggcgaagtcgtgacgtcgctggaggagacaatgcgcatggagcgcggctgggagggagtcgtcgacctccgctggggattccacgccgtgccgagcatgaagtcggcccttctcttcgtcacctggcagccactatggccgccgtattaattgctctcccaattctccgcaggcacctccacctgcacgtcatgtcgtccgacctcgttgcgcccgcgctcaagaacaagaagcactacaactccttctcgcccgacctcggcttctggcttccgctcgcgaccgtccggagctgggtcgaggcagacgaccgcgatgtgcgtgttggatccgcattgcaattcagagctgatcccttgctgacaggctttgtgttcgttgggctcactcctaggcgatggccctcccgccggccaagtacgagccgcttctcaaagagccgctcctttcacacctgacgggcgaagagttcaagacgatcccgaagctcaaggcccatctcgaggccgaactccagaaggccgagcgcaagcgcaagcagaagtgacgggtagcgcgatgccggtctggtccgtcgacgcaagtgctcctcacacctacccttctggtctctcttcttgcacctcctcttcctcgcttcaccctgtagccgagctcagtccctgctgcgctaactggcgccgcaccgctgcctggcctccgaccacttcctccccgggtcgcctacaccttgtcttgctcctcctgtctttcgtcaacccggcccaacatagtccaccacccagcgttcgcccgctcttcttacaacatcatgctcatcccatgaaacgcctcacccgattctctctctctcttcaacgctctacttctgagcctgcgaagcacggcgctttgtcgccttgtagaaggaggcgtacctgacggtgcgagcatcgttgtcagcagtcagtcgggcgaaaagtgctggcccaaggctcacatgttgacccgatcgatggcctttccatcctcgcggatcgcgatggcctcaacgtcgaagccggcgagcgtgtatctgagtaggatcgcagacagtcagcccagcgcgagagagacgctcgaaacgctggcttgcgcacctctggttgtaccacggcttcttgcccgcacttcggtagtacacctcgccgccatgctgcaagacgcgcatgagctcgcggatctgcaagtcgagctcgtgcttgagctcctcgagcgcccgctcgggcgtcaccgccgtctggtcggccgccttgaacgccgaatcggcgaggggagggaggggtgtcgccgggtcaatcggcgtaaaccagtcctgggcgagggaaagggcaaccgcttatcagccaatcccgtcctcgacttatttagaaggagagggcaaacctgagaatccatcagtatggccttggtgagcgcaccatcaggcaggccacgaaggacgttcatgatggtcgccgtgtgcaggcggaaggtcgagacggccctgttgccgcttttgcggagcccgtcgtagccggccttggtcaggtagagagggcacgactcgggcgtatagcggccgctgaggcagaggaggtagtggtaggcgccattcttgagcgaggcgagcttggcgaccgggtcaagagttgccgcaacaaagtcggctgtcgtgccgtcctcgaggaacatgcgcatctgaacggatgtgatgaggcggcgaagatcagcacgtgttcagcccggttcgagagcattgagaggacgcacctggttgagcgggacgccaagcgcgttccagaggaagaccgggctgccaaggatcatcatgagaagcgggttcatgatgacagggcgcagctgcgagacgagcgggcagctgaacgcgtcagacacgaaatgcagatcgcgacgcaagagaatctcactgacccgctccttccagaccttctcctgctcccacttgttgctcgccatgcacatagcctgaggaaggagacggaggggccgaggtcagtcgaaggctaggcgtggggcgactcgcataggggcaactcacgagggcgtccttgcgcacgccggcaagccagaaggcccactgcgcgagccgaagggcatggccactgtagccacggaaatgaaagttgtcggcgaacgacgtctcgttcaaacaccagtactggtaggcgtgcgacgagaggtagggcgccagcttggactcgagaagcgcgcggaagttctcaacccggccggtgccgaagagggcaaagtactcctcgaacgggagcgcctgggcggcggccagcttgagctcgagaatattgttctggcagggattcatgtcgacgcagtggatcctgtacggcttggacgcgatggcgtagtggagggcgttgtcgccggccgaggtgatgacgagcatggagtcgtcttccgtcaggcggagtgtcttgacgtcgacgtctgggtcctgcggtagcgcggacacgacacaatatggttagctatgaaggattgaggagagagagaggggccgtacctcccaagtgaagcctgtcgaacaccgcaagaaagggtagagtgttcagagcaggcctgtagcaagaattcaacgaacaggatgtaccgtatacgtgcgtgcgaaattggccgtgaatgtcctcctcgaggtacgggacgcggaccggcaggcccagctgacgatttgacgcactcagaaagtcagcaagagttatctcatggtgagaaaggaactcacctggtaatggaaggcgctcggtgggcttcccatgtcaacgatgacctcctgcgcaggtggcggcgagccggcctgcttgcgaaccttcggcgagtaggcggatgggccgagcgcgaagtcggggatgtcttcgccaatgtggccgatcgcgtcgaacggggtagcaggcgtgcgcaggaccgggctgcagagaccgatcgtgttgcctgtgtccttgtcgagcgcctgggtgaaggccgagatctcgctgaaggggcaacaacgcgtcagggttgcgtccttgcagacgggccaaggggaatctgaagcacgcaccgttgccgagagcagccaatgaagcagtagtacgggatctgaataaggagaggaataatgaagccgttgcgaccgttgtagctcttgatcgtgccaaacctgcgagagggcgccaggtcagcggcaatgacggtctgacagcaggccgataaacgtacttatactcgaggtacgaccggcggtcctcgccgaggtggacgtggtcaaagtcgaaccagacctgccaaaaccagcgcgagaaccagccgacctggcgtttggctgagccgatggcctgacgaagagaagggaaagagtgtcagttgatcgtccttaggctgctcgctgcgcaaaaggactgacacgctcccgagcgctgccgccatccttggaggtgtagaagtcggcgacgccgaccaggccgttgacagggtcgaggacggcatgcacacggtcgagcagggggtagaaggacggaatctggcggaggtcggttgcatgagtcagcactggtaaggccgtctcgaggggttgcaaacgacgcaccatggaaagcgaataggagagcgtcgccagcgtgattgagccgcgaggatcgagcccttctgaccactctggcagcatgaactcgctgagcgtggggaggacgctggtcagcagacggctccgtcgccatgcaaggctgatggtcgactcacgaagcgttctggcgaaggcagtggacctgcgtccagcccttagcggcaaagcggcgccgggccacgtcgagaagaggctcacaaaggtcaatgctgatggcagggcgcagcttgatcgtcagcagcgtttcagagtcgcctgaccgggctacgcacaggtagatcgcgtcaaaagcatggatgtccatgatcttgctcatctcctcgatctcccagccggtgccgccgccaatgctgacccagatcttcttgcgtccggtctcgcgcttctgggcagcaagatgtgacgccgcgagctggagcatcgttgtccggcccttgaggaggccgctccgcgtctggtcatagagcgaggcctggccggtgtaaaacgcgtcgagccgctcagactgagcgtccgacttgaccgagagcggcttgaggactgaatgagaaagggcgcggatgagcttgcgagccgagccgggtcagcatttcaagcagactcacaacagttgtacgcgaacaagagagggatccgaatgtcggaccagaagctgcaaaggagcgtcggtgggcgtcagggccggcgagggttcgtgagccagcggaatgtactcacagtaaagcgcaggcgacagcagccagtacgccgagagtaggcccaaagacctgctctggaacctgcggaaggtggattgcgagtgtgtcgtgcagctcgctgtggttcgacgagagggagagaagcgaggggcaggccggtcgacgaaatcatcagctgagctacttcaagacgcgtctttctaattgagcccgacttaccttttgctgtagtggtagccggcagcgaggccgaggacgagtgacgaacgataaagcatcgtaggcgaggccgggaggaaccgaggagtgtcttgaggcagaagtttttgtcggcgaatgcagttggatgggcgttggagagctgtacctctgtcgcgtcggccaggatgagatggtagcaggctgagggcggaggcgagggaaggctgatatcgcgatgccgcacgttgccgcgcggagagggctgctgcgcgccggcttgccagcgctcggccgcaagcccagcagcatccgtttcacgttcgaacggcaacgtttgcccgacgggcccggcaacgcctgaagaggcgcctctagctagcttcggctctcggtctgagcctagggagccggagtgaggtctcgtagtcgagagatggacagcggccgtcggaacgtgcgtcatccggccgaccgactctccttaccgcgtcgagcggccagccagatgacaatcttcagcaagggaagatgtcagcgggaacaccttgagcaggtccgtcaggcgcctcgagtgcgcaggaaggacgtgcgggcaagtaagcagtgccagcaggcgatgtcgtcggcgacggcggctcttggcgggtccgctggtgcactgccaacctcggacgacgacgatcggcaaggtcgcaagtcgctcctgaggcgccgggcagaggcgtttcatgcggatgttcatgattccaggcgaggcgaggagctttgagcgagcgagcgagcgattagttctggaaagtagtaaggggggggggggcgaggcgtcgtcacgagtcacgaagggagaggccggccgccgtcatccggaagggagcagtgacgcttgcctaggcctggtcgacgacgacctcaggtactggcgcagcaccgttggcagcaatggtcgccgacgacttagccttcttgacgagccagtcgtgcatgtcttgaagaacgcgatcgcgctggagacacagaggcgaggggtcgtatcagaggggccgctttgcgctttgtcgagcaggccagaagcggctgaccttctcctcgtacttgtcgccgagaccgccccaggcgtaggcgtgcatgactggcgagcagaggggagaagcgcacgtcagcttcgaaaccgatgcggcctcgagcattcgagggacgcaccatgctcgtagtcgtcccagaggctaatctccttgtcggcgtcccatcgtgccgagtgcgcgccagctttcatgcgcttgacaaacgcctcgctcatctgagggtcgcacacccggtcctgtttgccgtggacgatccggaccggctggtcgatcttgggcgcctgtgccgggtcgctgatgaggtcggccatgcgcaggagcgagatgccggtgccgacgcggatcttggccgagtaggtctgcgggtcggctgaagtatggtgaagcgagggcgcatgtcagctggcgtccagagcccggagagtcgcacacgcgcggcgtaccctggaactcggcatcgacgtccgggtgatcgctgacgaggccggtgacgaggtgtatcatgggcagagagggagcgagcgagttaagacctcggccgacagcctggacgatcgggtgtggcacggcctccttgcctccctgtgacaggacgccgatgggactaatcagcctcgccgagttgagttagacggtcaatcagcttctaggcgtactccgaggtaaggtgcgatggcgtagatggcctgtgtgaccgataaagaggagtgagctttcgagctgctgtcatattggctcggaagccggcactcacaaagacatccgggtccgtctcgggcgagctcgacttgtagggcgacaggctggatcgaattgaggcaggcctgtcagtctctggctcttgatctaccgcagcgcagcggcaactcacatgccgtaggccaggctcgagaaagaaggggttcaaagagtgtcagccagtcagctacagcaaagaagcagcagccagagacccgccgacgcacatcgtccagccgccgagcgagtgcccaacgagcgcgacctgacgcttcggccggccggcggcaaggtcgagccggatgacgtcgcgcatgacggcgtcgagcgcgagcggaagcgcgttctcgtccttgatgaagcagtggaggccggaggagcggccgtgctggaagagagttcaggccaaagagatcagcgctagtgtgcagcttcaggatcgctcgaggctcaccgtaggaaggtctgtcgaggcagaagatgagcaggcgccacgtcagcccacgtcggcggcgagcagctgagaagagattgagagagcgacaggaggacacacccggggcgatgacccggaagcccgagtcgagcagcttatcaatgtgcggcgcccagcggcctccagcgtcgtacaagcctgtcaaagtcaggcaggcgatgcttccggtcagtaaggacgcaggtggccgacggtatccaggagtccgagctcgagctggagctcgcaacgcaccatggacaatgacgacgtccttgccctctcctggccggtcagcagcgccatcaggtgcggcctgcctgctccacgtcttgtagaagaggtagtcgcggctctcggtgaggtcctgggcggctgaaagataggagagccgaagggtgacgcaggagaagggtagcaaggccggtcagcgaaacgtcctgcagccagggagacgatgatcccggatggaggcaggaccatcacgacagagacgaccgcagagacttgagatcaaacgcacacatgctgacctcggcgccctcgccggtccccctcccgctggcgtcgacgaatacccggcgccgggtcgtcgttacgctcgggtcctgctcgagcttgcgctcgtccgggtgcagcgggccgaggaaacggccgtgcgagagatccttgccgcccgacttgttggtcgacgaggaggaggagaagaggcccatggttcggtgctggctgcgactggtcggcgggatggcggttgggcgggagcgagcggggcgaggtcgtgtgctgcttgagagctcgcgccgagcggcgagcaaaggcccaagactgtcgtataccggaagcctgcacgactggaagcagacctcgagctgatgcctagtcgaccgacaggctatcctgccagagaggagtaggcgggctgccatcatgggtgaccgtctcggtcgcctcaccggctcaaaacggtgacgtcgtaggggcagccgccagcggtggcctcagccgacgtaacagagccgacccaagacgctccctagcagctgcgtctccaggatgtccaagcggttactgattgaaggacctcttcgctttctacgagcgagagcttctcgtcgtccgggcgtccagccttgagccactgccgacggccgctgctgctgcgcgagggacagcaccttcgagctgacagcgacgaggcagcaaggtcggccctcagaccgttccttcggccggcttgaatagaaaacagtatgatcatggctggtggatcatcttgctcagcgacagctgactcccggaccttgattacgtggtggtcaacgaggcgtcgtctacctctcccgggcttcggctcgccacgattgccggtggccgccggtcggtcgccttggccgaccgctccctccgaagttcgaatgtcgtctctcttaagctcacgatctcgacctcagccttcaacgattacctccaagcaaccacacccgcatgacgaccatcgtcgactcgctccatctgacgccctcggcaggggccatctacacgtcgtccgcgacgctcgagcagtcagtcctcgacctctgcgcttccttccgaagtcacccggtcctcgccagcgcttgctgcttgaggagcccgaagctgactacctcttattccatgttgccgacggtagaggagcgctggcccgaggtgtcttcggtggccaggtcatcgcccaggccctgacggcggcgacaaaggagctgcccgacggcaagggcttcaagctgagctcgatgcacgtcggtcctccttcacccggcgcaacagcgatcggcctttggccccttccgaggtattcctcatactgacgcatctagctccccctttgccgtgctcgttcgcagtgctacttcctcgccgctgccgcctccaacatctcgctccgcttcgaggtgaccctcctccggcaaggccggtccttcgccaactactcggtcgcggcctcgcagaacgggacaaaggtctttgcctgcatgtgtgccttcaaggtgcccgagccgggaggatcgtcgtttgctgtgcgttcccttgaagtcggcgaatcagctggcggtctggatactgaatccctcgccgctccccctgtcgctcactcactcgtcggctgcgcagctcccttgcccgccagtaccatcgccagagaattgcacgagtcgggctgatatcatccgcggtctcatcaaggcgcacacggagtggtcgccgaggctcgtcgccaacgccgaggcggttatcagggtgcgtcctgtcttgctgactgcgcgaggcaagcggcacgttgcggcgactgactgacgcccccgtcccgtcgcgacgtttcttaaggaaacggaagagggcccgatagaggtcctcgattgcccgctcccgaacgacccggtcgagtcgagggcttactggctccgaggccgtggcctcaagccaggccagctcagcccagaggtgcagaaggtaaggggacgctggcgaagatttgagagctgagcttctgatgggctgacgctcttcttattaccgtagacggtgctcgcctacgcgagcgacgcctacatggccggagcaggttcgtcctttgatgacctcgacgcccaagacgcgcaccagctgacctctgaccctccacctcgacccaccagctcagcggccgatggacatcgaagtgcccttcgcgccgacgccgggcaataagcgcctgcagatgcttgtctcgctcgaccactccatctggtactacgacgacgagtttgacctggccgactggatcttgcacatccagagcaccgtcgtgtgcgtcgcctctactccactttgataatcgagcggagccgatgctgactcgacttgctcatctctgactgtagaggaggcgacggccgcgcgatcattcacggcaggatgtttgaccggcgtggcaagctgctggcggcgacgatccaagagggtctcgtccgtgagaagcggccctcgcggccaaagaaggacagcaagctctaggcccggtgccgcaacttgtgtccaaggtagacgatcttgccggttgatcttttatgacaagaattcattcaagatgagaagcaggcccgcaggcgcaagagctaagggatacactgtctaaaagaggagatgggcggaaagctaaggccgaatcgcccggcccaagctgagcgagccaatgtcgctctcgccagccggaggtgccggctcggcagagaagcgtgagaggtcggccgtgctctcgatacgggatggcggctcagagacgtccttgccagcgccgcggcggatgcggacgatgtcctcgcgcgagaggccggccttgtcgcactgcaaagcggaagtggaacctatcaacaggggcgctcagataagagggacagatggatttgcgacgcaccatgccgcggaagatcgagctcgtctggtcaaagaggacgagcggctcgtcaaactcggcgaccgtgccctgatccatgacgatgactcggtcatagaatgcgatcgtggcgaggcggctaggagacgaaagacagatggtcagcgacaggcaacagggctgcgcgtcaaagctacaggcacgcactgagcgatgcaaagcagggttgactcggtgaactccttctggatcgcgcgctgcatcgtggcgtccgtctcgacgtcaactgaggaggtggcctcatcctggcagggagcaaagcgcggtcagcctcgtttcgcaaaaaaaacagcttgcaggcggtggcggggacaaacaaggacgatgatgcgcgagttcttcacgagcgcgcggcagagcgcgagcagctggcgctcgccggccgacatgttgctgccctcgtctgtgaccatgtggtctagctggaatttggcgtagcgcgccttgacgtcgtccgaggcgccagcgggtgcgacgaggccagccttctgcagggcgaggttgagctcgacgtcggccttggacgacgttgggtcgaggttctgcgcgtgcaaggccagtcagcgatgagcgaacgatccagacggcgctggcacgcgacgcacctctcgaaccgttccgctgtagagaagagcgtcctgcggaatgacggccagccgcttgcgaagcgcgtcgagaccaatgtgacgaaggtcgacgccgtcgatcgcgacctcgccctcaccaagctcgacgattcggaagagcgcttgaagtagcgacgactttccagcgccagttctgcgtgcgagaagaagcgagagacgttagcttggtagctctactactgctcgaccttgctccgggggacgtaccggccgacgataccgaccttctcaccggcccgggtggcaaacgagacgcccttgaggacctcgggcaggccctcgcggtagcggaggcggacgtccttgaactcgatgacaccacggtccggccaggacgccggtgggtcgtccggcgtcgtgatggcgccctcgggcttgaggtgggagtagaaggcgacgcgctcggccgtgttcatgtcttgctcgaccgtggcaaagacggtaacgagctgcgaaaagacctgagtggccgacaggccgtacgtgaggacgacgccaagcttgctcgggtcaacagttgtccggaagccgacaccgaagagggcaatgccgaggacgaggcagttgcccaagaagtcgagccggactccaagccagcgctggagggtgatggtgaggaaggcagcccgattctcaatgtcgaccgagtcctcgacgcgcttcgtgaagaagccctgctgccggactgcggcgaaagaagggaaggagtcagcgactgaccgacgtcttccgttggaaggcgacaacgcacaagctcggacgctggccatgccggagagcatctcgccgtacgacgtgtagatgtgcgagcgcatgatgctgtcgattcgcttaacctcgcgcgacgactgtaagaggcgggcgacagggtcagcagccgcttgcgatcatcaactggtcgttttgagcgggactgacggcgcggtagaatgtcgagacgacccagtagagcatgcccatggggacgaagatgctgcgaaagacagaagagacgggtcaggacagagatcgagacaggtcggaagcaggcaggacgcacacgccgaggatcgggtaagtgtagaagacgagagcaattgtgccgaggaccgagaaggccatcgtgagcagctggttccactgcatcggcagctggttgtcgagcgtcgtgatgtcctttgacagccggctggtgatacgaccgagcctgaagcgagatagagatgataaagctgtcagcggccagatgcagtctcgatcgaggcgacacgtcagacgtacggcgtcgtgtcaaaccacgagacctttgaccgcatgacgccctctagcgcgcggttaaagaggtactcggacgcggtgatgccgcggagatacatgaggaaggtgccgcctgcgggacgaggagggtcagtcgcggtcacgacagcgcaaggcgagtggcgggcgacgcaccaaaggtgagcagaccggccgcgacaccgagcgcggcgtagacgcccatgtactggccctcgttccagtccgcgatcgactgggccgaccagaggccgaggaagatgttgttgccgacggtcgccgcttgcgagagcgcgtagaagccaaagagaatgacgccccaccagagcgagcccatcgccttgaggtactggccgtagacatcaccggcgacggcgccggtcgtccgctcctcgtcctgcatgagaccggcaccaggcgtgacggcggcccgggccttcttctcgaccgccggcgtcgcctcgacctcgccgagagcttcggcgacctcctcctcctctgcctccttcttgagcgagccaaactcggcgatgagctggccaaaggcctcgccagtatcgatgagatcgtcgtaggtgccctgctcgacgatgcggccgttctggaggaggatgatgtggtcggcctgcggtagaacgtcgaggtggtgggtgacgaggacacgcgtcttgttggcgagcgggcccgagagcaagcactgctcgacgatgtgcttcgaaacgccggcgtcgacggccgagagcgggtcgtcgaggaggacgatatcggcgtcgaagtagacggtccgagcgaggcagacgcgcgccttctggccgcccgacaggttgatgcccttctcgccaatttcggtctcgaggccgttaggcaagatctcgatgtcggactctagcgcgcaagcctggatgacggcctcaaagcgagcctcgtcgtagctcttgccgaagagaatattgtcgcggagcgagcagttctgaacccagggcgcctgagccgcgtaggctgtcgagcccccaaacacgaccgagcccgactggcgcttcatctcgccgatgagcgcttgtaggagcgaggactgcacgatgaaagcgtagtgcgtgtcagcaactgctcaaggcgagccacggcaaggaggccgacgcaccttgccgctgccaatagagcccacaacgcaggtgagtccgccgcgcggcaggctgatgtcgatgtcgcgcagctgaaacggcggcttctcggcctccttaaagtcgagctttggcagggcctccgtctcgtcgtcaagcttgccgcccttctttgcgagcttagcttccttcttggccttggccgcagcagccttcttggcctttgcgccgacgcggtccttgccaccgcgaccgccgccagctttgccgtgggcgctgccgggcgcagacgtctcccacctgaagttgccgaaagcgcgaatggcctgagttgagagagcgcgtgcgtcagttgcctgctgacgaacggatctcggcgagcgacagacgacgtacgtcgggcgcgttcgagtcgacgacgagctcgtcctcaagctcctcggcgaggagggccttggtgatgcggagcagaccggcgtaagcatccgagcagacggtgagcgccatcggcagcatgacgagcggctggcggatgatgttgaagagctggagcgaggcaaagatggtggccgcgtcgagctcgtggccggagaggctgtaggtaatgaaggtaaggatggcggcggcgatgggcacaaaagactgtagcggaaaccgaagcagcggtcaggatgtagagcgggcggcaagcccggaaccgaggcgggcgcaccatcgtagccgtcatgccggcacgcgtgatggcgatcgtcttgagcttgcccatctcttgcgagcgcagctcaccaatccggccgccaaagaacgtctcgtatgcgtagagcttgacgacacggatgccgttgagaacttcagagcagagagaagggacggtcagaagagccgagggcggcggagaaggtcagccgagaagagacgcaccctcagtcaaaagccggacacgcttgtcgacgatgtcgagctgagcctggcgggtcgagaacatgcgcttgacaaagaaggcctggatcggcgtgttgaggacgaggatagcgatgccaacgagggcagagtagcccagattctgcagagtgaaagggtcagcgactaaacccatagtaaagagcagaagtgcgacgtacgacgagcaacaggatgcagccgacgatgatgatgatcggttggacccagacgaagtggacgaggaaggctgaccactccataaagctcgcgtcgttcgagacgagcgtgatgaggtggccgttcgggtggagaacgcgcgacttgcccgagaagcggagcgacttgcgcgagatgttggcgatgagcgacgtccgcatcactgaaggaccggagagggcgctggtcagcgttgttgcttctcgcttgcgagagcattagagactgctgctcactgaaaccgagcagctggccgcgctgcatgtactggttctggaagagactcgcgacctcctgcatgatgaaaaggccaaaagcgaggccgagccctcggccgacggctggcggctggtcgagcgcgccactcgcccgctgggcgtcggtcgccttggcccaggcgtacgagacagtgatgtacttgagcagctccttggtgatgagcggtgcgagcgtcgtgaggagtgacgaaacgatgagaaagatggcggctggagcgatgcggagaaaaggtcagccgagatgatttgctgcttcacacggagaagagggcacacgcacagagccaaaacggccagaagaacgtcttctggagcgcccaaatgagcgactggtcgtacggctttccatcggcgccgcgaaccttgccgccctcttcgttgccgtcaaactcctttgcttctttggccgccttcttgtcagccttcttgccggcttgcgtcgcagggaccggcagcgtcggcgacgacgagcccgaggcccgctgcgcctcgtccttgccggccgccttctcgtcctcggacgatgtgttcgactggccgggtgtccaaccctcaggccggagatgacgtggccggcgctcgatcggcacgcggtcgtagaagttctgatgggggttgacgacacgcgtcagtcagctgcgcgacactacactctgggatcggagcccacgcacatgctcaagcttgtcgcccatcgtcacggcaagccggtcctgatcgagccggtacatgtctgcgcacgccgtcggacatcgccggcaggtggaggagcggaagtcaagccgtcagcctgccgatcgacctgttccgagcgcagactggtgggcacgcacctcccgcctcgagcggccgcgagtagccaaccttgaggacggggaagcaccacgagaagagcgtctgcgagatgaagttggccttgacgtcgggcgagagcctcggctcgggccctggcggcggcgcctccttgagccagcgaggcatgatgcgtggcgggaagaggaggaggtggtcggagtggtgaagctaacggagagcgggcaagaggagagaaggtcaatcaggtatcaccaccgctgcatgaatgccgctcgacggacctcttatctgagatgaagagaggccggcgctggagagattcgcccgggagcgcacgacgttcggagggaggggagcctgcgtgacgcggtcagtgaaggcggcagcggccgacgagctcaagttgtcagcgtcggcgagcgcaagtctagccacctatcgaaggtcactcacgcagagagccggctggagatagtcgtccgctagagagagagaggagaaggagaagggaggaggtggacgttgaggtcgagcccttcagcgtgggcggtcatcggccagagcgacgaaggagcgaagcccgcgtgtgcgcgttggccgcttcggcgccggcggaggccgaagacgagccggccgaacggcgggacgcagcttcctcccctcccccgggccccccttgcgacgctgcctgtgtccctggtccgagggcagcgcagacatgcagatattccatctagacggtacctgaagtcgacccctctgtcgaggcagcgctttcgagccggtaggcgggcttcgcacaagcaccagcgctcggccctcatcagcttcgggctcggtcagcaagcatcgatggttatttatttcctccgcccgcagtcggttgcgacggagccggccggcggccgcccgcagcgaatcagacgccgcacgaaattccgaaaaggctgtttctcgcttgactcgacggcgggcggcagatggtggggcgtgcggtccttttgtaggaagctgagcatcgtctgccacgaagaaggaccggggagatgagtgccgggcggacgctcgatttataacggccctgccgttgacgcgtaacggtatatataatgtccgttcggattattctgccactcgcaagctttacctaacgggttcgatcactggatcctggaaacgccggttcgattccggcagggtcctttccttaacccggaacaggtcccttcgtctagaggctaggacgccaggttttgaagctgttttgccaccagaaacgggtcgtcaggccactttcgccttcgtggcagcacaagtgcagactcgctcgctggctggccatgacggcttgcggcaggccctcttttttcccgcggccgccgcgcagtcgcacctctcttctcgtccatcttttgagggagcccgacgacgcagccctcctgaccattcacccccctctactcccagccatgaccgacctcctctcgattcttcccgccgagctcggtctccggatcgcactcaacctccccctcccgtcactcgccgcgttggagcgggtatcgcgcgcctggcgggcgctcgtcctcgagcacgaggacctcgtctttgcccaggctgccggctgcgactatacggccgaaggccaaggcgccgctgccgggctagagcacgcctgtcaggccgaggcaaagcgggtcttccggacggccgcctgggacggtatcgccagctggcgcgagttctgtacgtgatgtgctctacctgctgagccgccggtcaacctcagccgagctgcccaggctgacctttccttccctccgcccttcctctggaggccgccggcgctcgctcgtcggcgagggcgtacacgacccgctctgttatcgggcgcgcaagatgacgacggccggcgccatcggcggcctcagcatggtctggcggctcaaggtcgacctcgccaaccgctggcttctgacgactgaccaccgaggcgggttgaccgtcaccgacctcgacacgaacgacactctctggcggatctctcctgtgcgtactctttctcgtccttcttcggcgccttcctcagtcgctgccctactgacgcctagctgccgcctggtcttgacaccctctcgccgcctccggcgtcaccgcgcgcagtccaacctccggcccttcgcccacctcgagtacgaccccgggcccttcgcgacgatggtcgtcgaccgattttcggacgagctcgaagtttggaagctcaactcgaccggtccgcgcgggcacttcaagctcgtcggcctcgtgccctcgctcgaaaacatgcgcggctaccacctcaagcaggggacgctagcgatcgtcacctcgaccggccagacggcctaccacgatctctcgggcgacgcgcccatccatctccggacgctctcgcacgcagcagggccgatcggctacctcgacaagacgccggagacgctcgttctttgtcacggctcctcggtccgctgctatgatcccgtctcggcggtcgagaagggcagtttcccaccgtcggctggcacgccgctcatgcactactacgtgcgccggccggcggtgatcgtccctcctgcacgactcgccgaggtcggggtcacgcaggttggcatccgacctttcttcgagaacccgctcgatccggagataattgacggcgacggcggcgagtggcaggcctgccacgttgacggaccctacctcgtcgctctgtcgaagaagagccggctcttcgtttgcacagactacgaggcggtgctcgcggccgaagagccggcggaacgggttcgcatcgtcgagcgctcatgctgcgtctttgacatcgaacgcctgctgaacggcgaggacgaggatgcggatggaacgaattggctgagtatcctcaacggccaagctgcctttggagcgaggtgcgcgagctctgcgggcgagatgaagccctgcttgccgacgctgacaattaaccgactcccttcttcagcgatcacctgattctgctatctcttcctcttcctagagacaactcgtacgcgcccggcccgatcccgctcgcgctcggttacccgatggaccccgacgtcccgccatcgtgcattcagctcgtcgccgacggcgtcttctttaccgtccgcgactttatgcgcaaggtcgtcgtcgccgtctggaacgagggagctccactagaggcggttgacctggacgctgccagcggcggtgaggtcggctcaggaacggaggatgacgattgggaagacgacacggatctcgacgattgaaatggtgcctgttcaggtcgatgggctgcccacggccggtagcttgaggaggacggcggcgtaaattggacagcgtgcagcggtgtcgcgtgacagatcctgctcggcgatggcacgcggctcattgcacggggcgagcgtgtcaagagagggccagccgctgagactttgttctatcagcttgctgcttccacgagtggagagatctgacgcagagatgagtagccgagaagggctggtcgggcaagagcatgcagaagttaggagatgcccagcccgagacttgcggtcgacctggccgtgcactgggcgggctggcgagcgggctgctgcgcggtgctgctgctgctgccaccgccgctgccacctggccatgaactaggcagagagcctgcctgtgcctttgtactcgttactttgacctgatgacaaggaggatctccattgctcgccagcttgctgcccgtcgacgccggacgtccatgacgaccgacaggccatcgtgctgactgactacccccgcccgtcgaggacgcgccgacgcgccgatttcgccgtcgcggcgttgagcacctgcctgctcctgctcctctgacctcgacgttctcctccgcctgtctgctctatcaacctcgctcacccctcacgactgctcgatacctgcctctagaccacctggctggactcggccttgacctgcgcttgcgcatgttgaatgatcggcctggacgaaacaatctttgaccaggctgccggtcgccgccgcccttgctcccgcccgcctcctctgcttcttccaggcgaggtcgctcgtctcccttcttccgtctaaccacgtccttctcacgtaccagctcctcccatcaccaccacctccttgaccagccacgcctctcactcgcagccaggtgctcgccgcttcggcggcagccaagcgtgtcctccggcctcggcccacgctgacggccgggccggcaaccaaagctgagcgagctcagcctcgccggaagcccgcgtcgagcaagccaaaggccaccaatcccgaggctgaatcgaccgcccgtcctcggacgggcaaggcgaaggcggcagtcgaggaggttgtggcggtcgagtaggtggcggttgaggaggcagcgggcgaggaggcatcggttgagggggcggtggtcgaggatgtggcgggcgagaaggcaggaggtgagtcagcagaaggtgagatggcggtgagtgaggaggcgaagggcgagaggcagcggacgaggagccgaaaggtacgccggcgacgacggatgagctgacgatcgagacggcgacggtcgagcaacagacggacgcgattcggccggcggtccagcccgaggtgacggcattgatcgcggacgagccgacggtaaaggagacgacggaggagccggtgatcgagaaggcggtcgatgacgagcgctataatgcggcggtcgatcaggaggtggccaacgcaacgaccccggagcggccggtcggggaggtggcgacggcggtcgaagaggagtcggccgcggcagtcgctgcggacgagtcaatcggtacgtcccctgctttcgcttatttccctttcgctcccgaccacaagctccttgcgccctacaccccggaggtggagatggccggggtcgagtctgaggggctggttgagcacgaggcgtcggtcgaggttgtcgaagtcgagatggccgagcttgaggggccggtcgagcaagcgcccaaggttatcgagtgcgttgacgtcgagctggcagagccgccgaccgcggccgaggaaggaatgctcgctctgcagcgcgcccgagtcctgctgcagacgaagctggcggccaggaaggccgccggaaagaaggtcaaaccgctggccgagcccgactatggggctcggccggccgaggctgctgaccgccggcctcctcctccttcaacccaggccgacctcctggacgagactctttccgacctgcccgccgagtgggtataccgcttcgattcgggccggaaccgaacgtaccacctcttcgcgagcgtcccttctcgcttgcttgtcttctgcacgaccgaagctgacaagactcgcctgcgcttgccctctcgagtcacagcgacatcggcctgacgacctgggagaagccggaggtcgaggaggagcttagcaggcccgacgtttaggacgagctctcgcacggcctgagggtgaacctcctcgatcacctggcccgctaaaggaaggagaaccccgttcagccggcggcctgcgagctcaaggcgagccagtgccgctcggccgacgcttgcgagagcgttgaggtccaggtgcgtctctcgcagccgttcctgttgccgctcctccggagggccttctgctgactcccaagcgcttggcccctcggctctcctcccggttgacgctggcagggctcgttcgatgacgtcgcggtctctgtctcgttgcaggcggtctctcatcacttcccctccgccagcatcctccaagttcttcctgacctgggccggctgtcggccggcttcggctcgacctcctcgtgggttggcagggtcaggcttctctcggtcgtgtggccggcccctcgaagcgtctttgctgacctcggcatcctcaaccccctcactacccctgagcaggtctctcggcacgagtaagacgtctgcggtcggtctttgtcttttgaactttcattgctcgatcactacggtacgtgctctgtcgtctcggactgtgccagccttgttactgaccctttgattcataggacttcttccagatggctcctttcgcagcaagtcctgccgcctcgaccgctcgtgctcgacccctgtgagccggatgtcgtcgacgctgccctcgcacgtacgaggcgggctcaacaactgtccgatgtcttgagtccagtgagtcatctctctcgtgtgcgctactctgcaaggcacccttagctgacgcttaatcgcgctcgaccgtcccctctcgcccagcatcagcggcgcttgctatcagcagacaagtcctgctcgcttccccccttgaagcggttcacacgcctgatcggatcaaaggatcatcgacggcgaccgccaaaagagcagactgtcttccgccgccgccgccgcttgatcgaagacttttctttgctgtgcctctgcgaggtcagtccctccggcggtgggagctcttactccgagtggctctgctgacttctcgtgcccgtccggtcagcctcaatcctcggcaaggcgcaaagaagggcggccgttcgctctgccggcctgcgtcctgcaccggccgtcgacagccctccatcggcgaccgtccgtcctttcaatacgacgtttgcatcgctcgctcttatcggtacgttctttgctcttcgtctcgtcactgagcggcttgccgcgttgccactcttttgactgactttggccttcgtctgcatcgtcctgcttattgcaccggggtacgtttgatcgcttccatatctactcgctcgaactgagcgagaccgtctaccttaccgctgactactgctgcgcccctcgctctcttccggcgcgcttcccttttccacaagcgcaagcgaccccatgaccaagctccgtgtcagtcttcccgttcccctcctcccccacctcctccttctcgctttttaaatatgaccgacatcgcctcccacaccgagcagcagcaggagacgacgacgacgacgacgacgaccaagacgaccaagtcgtcgtcgtcgaccgacggcgcccccaagctgacgagcgtcgagcgcgtcgtgcgtctctccctctctctctttcttttcgccctccttcctcttgccctgccttcgagacaagcgacggcagagcctctccattgctctctgccctggctgcagccgcgcgaagctgacgcccgctctgccttcctctgcccatctcacctccgccattgcctccggtcccccttgccctgtcctccccaccgcttccacatccgctcgggccttatcgcgccatctccctcgcttcttgtcccatctttcttgcctgcttctgcatccatccaccgacatccgctcgcagacgaacatccccgtcgtcgtacgtctcgccttcctctccgcctaatccgactgcgcacgggtcgccgccctccccaacgcacgcccctcgcgagcggagatggcaacgtgctaatcatctgcacccttctcggccgacagaacgactcgctcaaccgcacgcacgagctcctccaatcgaacggcctcactgcgcgcgcgtacggcctggccgagaacatcgtcaagacgggctacggctacgcccagccagtcctcgggtacggccccgccgcctgctctcctgcccattgccatctcgctgaccttgatccctgcgcttgacccgcctccagctacggcaagccctacatcgagagcgccgacggcctcgccaacaaggggtccgtctgccgggatcgagcccctttgtcacacgcccttagcctgaggtccgccgctgacgccatcgcttcccttccatcagccttgacatggtcgagtcgcgcttcccgtatccgttccagaccaagacggaccagattgtcgtgcgtcgggccgccgacagtggtctctcgcgtttcagcgctgacggctcttcccttgctgcaggccgacgccaagaagcccggcgacaaggcttactcggtcgcccgcggcatctatgacaaccaaccaatcgtgtacgtcttggcccgacggcttgagggcatgtatgcgccttgtgctgatgcgcctctctgcctggcctttgcacagtcagaaagccgtcgactcgatccacgtcatcaagtgagtcatttgctgctttcgcacactcgccctttgcctgaccaccgagcacccctcttttacagccagcagctctcggcgaccgtgtcgggctccaaaaagatggtcggcgacctcgccggcgacgcgggcgccaagattggcgcgctccagaacgcgttgctcgaggagctcggccacctcaaggtcagtcactgaccctgactcttcattgcgcctcgtgctgaccttcatcgccatctggcccgcactcagtcgcagggcacggcgctgccgggaatgatccagcacaacattggtcaggcctaccacgacatctcgacgatcctgctcgacaccgacaagtcggtcgccgagcgcggcggcgacatcaccaactacgtgaccaagacgctccagccgatcctcgacaaggtgctcgagattgcgaccgcgaccaaggagtcggccgagcagaaggcgcgcgaggccgagcagtacggcgaggaaaaggcgggcgacgccggcgtcgacgtcgatggcgtcaagcgcaacgtcaagggcaaggtcgacgatgtcaaggaggtgcgtcaggcgcatgccgttgcatgtcgttgctcgtccctctggctgaccttccgcggtcggctctccccctttaccgcagaccaaggacgccgcaaaggactcggccaaggccaagggccagcaggcccgcggctacgcccaggataagactcagcaggctggcgacgtcgctgaggaggccggcaagcagggcgcgcggggagccaaggagactggcaaccaggccgccggcctcagccagcgtgctggccagaaggtacgcgacacgtctcccctttcccgcgttcgcctgtcttcacgaaaggctgaccccctcctctctcgctctctaggccaacgagctcgccggtcgcgctgtcgaccgcctctgagcgacaagctgcccacccgctgccgaccctcgtctcgacttgcccccaaaagccctgcccgcgcctcgacgcgcccaaatcctcttctagttcctttgatgcctgcctcgcgacctacatagctctctctcgctcctcctttcatctctcctctgctcgcttctctggcggccgggcccttggcctgcgtcgcgctctctgacacacgacctttcttccacacgacatgtcatgcccctcctcttccctcgacccgcctgtcatcagcccgtgctcgacggtcaatggcgcgtgcaatgcgtgatctctcctcatttctcgccgcgtaggtcgccggactgcccgacgtgcgtgggcactcgggccggcgacggccgggctgcgcggacgaggggggtaggcgcaagcgcggccggggccgcacgagcggtggtcgatcgacaaagcattgcagctgaccttccgagagccgacgaccggtcagagggcaggcaggttctgcagtcactctgtctcccatcctcacacctccctcagctcccttcaacaaccacttcagagcctcgtacgttcctgcgagcgctacttggccagccctgatcgctggctgaccatgagaccggtctcctccggcgcgcgcgcagcccgtccctgctcaatcctcctcccttccgccctccctcgccctctggatcgctctcgcatcccgctcgatatgtcgcacgtctcgcctgccctccgtctggcccggacgcccgtcttgcgcctgcctccgctcgtccgccggtcgtcgtcgacgccgacgtcgtcgagcagcacctcgcacgagcacgttgcaacgctcggcgtcgcgactcgctcggtccacctcgccaacaacagcgacccaacgacgggcgccgtcatccagcccatcacgctcagtgcgaccttccgtcaggagcggccgggagttgcgctcggtacgtgcctctacaaaatctgcctggcgggcgggccaggccggcaggctcaccctctctcggtctgcggggtcggctgacggattggtccttccaccccgcgtttcgtcccggccgccccccttgctatttcgtctcgacgtcgactttccacagctccgggcttcatcgtgcgtctttcgctgtcttaatgaagtcgctacccggtcgacccatggtcccccgggtggaccggcgcgccgaatccgtctccctcggtgagagcgcgcagctgacctctgtgcctcaccgccggttccgcccagtacgctcggtttggcaacccgacccgcaactcgctcgaggccgtcatggcctcgcttgagaagggccacgccgcctacgcgacctcgtctggcatggccggcatcgccctcatctgccagacgctcggccacggcggccactgcctcgccatccgcggcatctaccccggcaccgaggctctcctgctcgacgtcgtcagcgacactcagggctggcggaccgacttcatcccgttcgagactgcgaccgaccaggagatttacgactcaatcaagcccgacaccaaggtgcgcggccgcaagtgctcatcaaaagtccgtgtgcgctcttgctgacggctcggtgcccgacgatcaggtcatcttccttgagagcccgaccaacccgctcattgtcgtctccgatatcccccggatcgctgcgatcgccaagtcgcacccgtcaaagccgcttgtcgtcgtcgacaacacgtttgccggcccttactacacccagccgctgacgcgtggcgccgacgtcaccgtcaactcgacgaccaaaatgatcggtggccactctggtgcgtcgccttcctgtgcgacatatggtccactggtgctgacgccctcacccacttccgctagatgtcattggcggctgcgttgtcatccgtgacggcctgcccgagctcgaggccaagatgcggcggctgcaaaagtcgatcggtgccgtcagcgcgccgttcgacagctacctgctcgcccggtcgatcaagacgctccctatccgtgcgatccagcacggcctgtcggccctcaagattgccgccttcctcgaggcgcacccgctcgtcgagaaggttctctacccgggcctcaagtcgcacgtccaccaccagcgcgtccgggatgccctcgcgccggccgtttggaaggacctcgagagccgcaagggctgggaggccgacggcgtgccgtttggcggaactctcagcttccggccgaagggcggcaaggaggccggttcgttcttctttcccaattttcttgtctcgcctcgcttcttcgctgaccaccctcttccatctctgcagccgagaagttcctgctcgagtcgaagctgctgacgctggccgagtcgctcggcggtgtcgagtcgctcgccaagctcgcctggacgacggcctcgcccctgtcggacgaggaccgtctcgcgagcggcatgacgcgcgacctccttcgcgtctcgatcggtctcgaggacgtcgacgacctgattgccgacctcgatatggcgcttaagaagtcgcacgcttagacaggacacgcgggatcgcggagtggactcacttcgttttgctttgcatcatagatcatgacctcaaagacgaccggctttggtagagaggcggcaggggatggaggagcgcgtgtcgaccgttggcaaggacgctgttgagcacgtcggcaaggctgcctttgagttagcaagaatcttctttccgcgcagacggctcttctcactcaatcgtttagccagctgcgtaggcggtcgagctacaaggacagtgtatctgtcagctttgacgagaaggggatcaatgcgaagccagctcgaaggcaaagagcgactcgtcgcgcacagcagccgtgaccctaggcgtcgctcgacctttacctcaatccaccttcagtccctcaacccgctcacgaccgaccgacaaggcagagaaaggtcatggagaaatctaagggagcgtgaggccgaggcgtgggaggtaagaaagagttggtctgacgagcggagttgcgcgcgggtggtggtgaagaggaggcttgaccgatagaacgcagccggtcctaaaggcgaggaggcagatgagcaggagatggtaggagaaggaaagcaacgtcgggtgtgtccaaggtccggcccagagcgccacaggacccctccgttggagcttgacgaaggccggccgcctacttgccgccgctcgtcttgaagaggatgaggccgccgagcgcaacaccgtagccgaagacctgggtgaaggtaacggtagcgctaaacaggaagacgctgctagagataagtagcaggtctggcgtaacaggcaagcggaggaagcaggtgggtcagcaagagggcaggagccgaccagggcggccagggagaggtctggagctcgaacgacactcacccttgaagacacccgccagcgtcaggacgaggccaccggcagccgcgatgaggaagacggcagcgatgttgagcgagaaagcaatggaggcgttggcgagcatgacgagcgggccgacgcgcatgagcgagtggaacggctggaggccctcggtgaagacaaggatgcacccgttgaggacggcgcagaccggggcgtactgcagcattgcaacgagacgaatagtaggacatcagcttctctcttcgtctgcagctcgtcagattggaaggtttctggacggacgtagtggagcgagacgagggggtccatcttgaggccctggaggagaatctggatcatgacgagccgcgacgactcgaagaggacggcgaggacctggcacatgaagccaaagagctcaaacttgacctctccataggcggcgaggccgcagccaaaggaaatcatggcgatgatggccgcgagcttgcggttgggctcctggagccgggccgcgaacgagatgaggaggatggcgaccggggtaaaggccttgagcatctggatgaacgagaccgagagcgtgaggtaggccatgttggagaggatgagcgagcccgagaagaggacgccgatcgggatgatggaccgcatgtacatgtcgcgctggtcggggcggggggcgggcgggagtcagggttctgaagactgcaccgccacacgccgctctgtacaacaagcactcaccgtcatcttgacgtcgtcgaggccgttcatcaggggcgtgaactgccggaggagccgtgtgccgatggcctgcagcaggagcgggaagggaggagggtcaggcagagccctgcgtgcgtgctgctcgggagaacgggagtcgacccgattgcccctgagaaagggcaacgggccgtcctctgaacgcagatactaacggagaaggtcatgtggaaggtcgtgaggaagatgggctgcagtggtaggcgaagggggggactgaaggtcagctccgattcggctccgaaggcagctccggctcagcctcctgcgacagagcagcccgaagcggacgaacgtaagggaagtcaaggccatcctccgagaagaggtacttgttgaagaggatgaccgaggacgacagagcgatctgcacgggcaagacgaggagcgggtggtcaggacaaggtcgaggtgaaacggagctagggtcgcccgggaagggctgctcgtagcgaaacgggtaagcacccagacgggaactgcggagcaggacaagagcggagcgaacggtcagctcccagacggcgttgcaaagatgcggaccttgaggcgggcacgggtgaggcagtgaccgggtcgagcgagtgtttgggagcaagaccagctgtggcaataagtgcgacggccagcctctctacaccaaaagactcgctgccaccgaaccttttctagctcctcatgtacagagggccttagtgcaatgagcactgcccggagactaggacgcactgatcatggcggccgtcagcttgggcggctccttggccgtcgtcgccttgggcaggaaggcctgcgcggcctcgtcgtcgcgcgagctgccgccgttgcgggtgtcgagctcgatcgacggtgccgggtaagccttctcgagatcgacggacgggcgggacatggctggcaaagagaaggaaggagagaaggaggaggtacgagtgaaggtgggctggaggagaggaagagcgagcaagggagggcgacgggcggccgcacgcgtcggcgcgtcgctcgaagccgtccctctgccgaaaatcgcctgccgcgcgcgcgcgcacggtcgcgcccccagtcattctattctgccagccctggacgacgcagaacgaacactgccctcctcctggtggccgagaccgaatgccctctgctctgtccatgctgtagcagatcagtgacaacacgagctcgcaaggcagcgctcgagtgggactgatgatgggggcgaccgggcccggtcagcacttccttctcgccccgcgcggggcagctgcgcccgcgatcgtcgcccgtcgaagcctcttccgaggcatggcccagcaacagcaccctccggccagtctgcaggcaggaaagcgaccataagttttcggcactcttgtcctcgagccggtcgaccttgagcacctggcttccgagtgggcgaaaggggtcaagctgcttgacagaagaaggggggccccgcgggcgtcattctgcgctgtttctccctccgtctcgctcgccggaccgtcgagcctccttctctccttcaacgacctccttcctccatcctccttcttcccttgtcgtcgtccggtcgtccctttttctccttcccctcccgccgccctctccctttcgcccgctgctatggacccctcgctgtcgtcgatccaggagccgccgcgcgcgccgcctatctcgctcgagaccctgcgcgagcagatctcgaagctcgaggacggcctcaagggccgcgagtacgcgctgtccggccgaatccttcatctgacggtacgtccctttggctgttctgctgtcctgtcagcatgtcctggcttgggcgacgaggaaggaggccaacgagggccgggctctcgagatggccttccgagcaggcgcgccgcgcgcgggacggacaaccgaagggggaggctctcgcctgcttcctgcactcctcacggtcgaggcctgaacgtcggccagcgcacgcagagcatccctgcctagctgagcgtgcccgccaggccacctcgccttggatccttcccccgctctcgcgccgcaggaggagaggccaactcggcggcgcgcgcgcgccggttcgcttggcccgactttgcgccctcgcgtcattccctcttcccccgcacttctcagcctccgacagcttctttcgctttcatccttttcttcggtcgtcggccggagcgctgacacgtatttcgcatgacctacagcactacctccccgtcatcgcgacgctcaacaccaaatcaacgactgccgtcccggtcccggaggccgagtccccgccggccgacacgctgactgaggctgcgccggcctcgctctcgtccaaggtcgccgccgccgtctcgggcgcggcctcgtccgtcgctgccgctctctcgccggcgaccgcctcgtccgagcagccgcagcagcagcagaccccgtcgtcgtcgtcgtcgtccaagtggaccgtctcgcagcgccgcggccacaccgccatggtctctggcatcaagtccctcgccgcgacgcacgagcagctcgtcattggttggacgggccccgtctcgctcacgccctcgaccgacgccaacggcgacgctcaggctgaggaggagacgctcgcgagcgccgacgacgtctctgcgctcgtgcgcgagcttgccgctttcgaccagcgcgagggcgagggccgcgtcaagaatgtgccggtctggctcgacaagcaggtcgcaaagggccactacgagggctactgcaagacgagtcagtcattgctgtctgctcgaatgctgcgcatcggtgggctgacggcgcttgaccctctttagccctgtggccgctcttccactaccttctttggcaggatggtgcgctccagctgccttgcgaagaatcccgtcgaccacgactgacgagatgagccctttcgtttgcagtcgcctccgagtacccgctcgaggaccccaacttccggccgtactacgaggccaacaaggcctttgccgagaaggttgccgaggtccaccggccgggagacctcatcttcatccacgactgtgcgtctccagtcattcctggtccagctgctgtgctcctgttgttgacaagcttcctcaatcaattgcagaccacctcctgctcgcgccccagatgatccgcgagctcatcccggaggccaacattgccctcttcatccacgctcccttcccgtcgtccgagatcttccgctgcctccccaagcgcaaggagatcctcgagggcatgctcggcgccaacctcgtctgcttccagacctactcgtactcgcgccactttatctcaacgtgcattcgcgtctgcggctttgagacgacgccggccggcgtcgacgccaacggcaccgtcaccgccgtcagctactgcccgatcggcatcgattgcgagcgcgtcatccaagaccggtgcgtcgcgctcacttgcctcctcatcgtcgctcgccgctgaatctgctgctttgtcccatttgctccccccagcaacggcgccggtgtcggacccaaggtcgccgccctccgtgcgctctacgccggtaagaagatcattgtcggccgcgagaagctcgacgtctccaaaggcgtcgtcgagaagctccaggcgtttgagaagctgctcgagtgctaccccgagtggcgcggcaaggttgtcctcatccaggtcactcagcccagcctgagcgacagccccaagctcgagcggactgtcagcgagctcgtcagccacatcaacggcctctacggcagcctcgacttcacgcccgttcaccactagtccgtctttttccttcaccccgcacgctgctcctgccctggctgactgtcgtctttgcgcacccgctttcgcagccaccagacgatcgcgcgggacgagtactttgcgctcctctcggtcgccgacctcgcgctcatcaccgccctccgggacggcatgaacacgacgtcgatggagtttgccatctgccaggacaagacgtccaaggcgccgatcgtcctgtccgagtttatgggcacggcctcgtcgtttggctcggccctcctcatcaacccgcacgacgtcctcggcgtcgcggccgccatcgaccagggcctgacgatgggccaggaagagaaggagcgccggcacgccgaggtctacaagcaggtgacgagccactcgtcgggctgctgggcggccagcgtcctcaaggttctgcttgagaacattggcggcgagcactcggcccatgagacgcccttcctcgacaaggccgtcatgaagcagaagtatgatgccgccaagaagcgcctgctgttgttcgactacgacggcacgctgacgccgatcgtcaaggtgccgtccgaggcgacgccgaccccgcggacgctcgccgccatctcaaagctggccgaggacccacgcaacattgtctacctcatctcgggccgcgacggcgacttccttgacgagcactggggccacgtcaagtcgctcggtctctcggccgagcacggctgcttcctccgcccgcccggcggcgagggctggaagggcctgaccgacaagctcgacatgagctggatgagcgaggtccaggagattttccagtactacaccgaggtcagtcgcgcgttcggctgtcgatccgaagccgatcgatgctgacacccccttctcctccttcttgctcgcagcgcacgtcgggcagccacattgagctcaagaaggcctccgtcacctggcactaccgccagtcggacccggactttggctcgttccagtgcaagcagtgtcacgacctgctagagagcacgctcgcgacccggcggccgatagaggttcttgtcggtaaaaagaacctcgaggtccggccgcttgccatcaacaagggtgagattgtcaagagcatcgtctaccagcaccccgaggccgagttcatcttctgcgccggcgacgacaaggtgcgactcgcgctttgcctaaccttctgaaccagctagctgacgcctcagcgcctctttcgcagactgacgaggacatgttccgcgcgcttcggcatgtccctgcgctcgagacgatgccggccccgatcgccatcacctcgacgtgcacgcccgaggagattgaggccctgcccgaggtccaggtcgacgtcacggccgagggcgtcttctcgactgccgtcggcccgagctccaagctcacgctcgcccactggcacgtcacgacgcccgaggaggtcgtcgagatgatggagcacctcctctagatcgatgcggcgtccatcgagctggctgccgctgcctcgacctcgtcgagaaggcggagatccacaacgcgcagagtcggctgcctcttcctcacccctgttcaaaccttcctacggactctctcctcgcagcctgcgccggtcggccaggccactcttgcctctctttcccatacccttttcctttcagccgatccaagtgacgccggcgcgcggtcgacggctgtcgccctcctccacattctgggccaccacagacgacctgtagatctagaagactcgcgctcagaggtgctctatatgacgcctgtgaatgagaggaccgtcgtgcaagacgcttgacgacgtgtgtcccggcgttggctggcacatgcaatgatccggagagagagagagatctggctgcgccgaccttcgcgagagggacggcacgacctcccctctaaccatcactcgcacctctcttaaacccagcctctcccgcagagcaccatgtcccagatccagcagcctccggtcgccgaaggcaaccctatcgtagccgccccgacccctccgcccgagcaaggcccaccgccgtctcacgcccagccggagtcggccggccctcctctagctggcagcatgcccctcccagcaccgactgttgccgccgccgctcctggcgcaggggcagggctcatcgccgcaggtggcctgctcacgccgggcgggacgccctctcttgccgaggtcgagacgtcgcctctcgccagcgttgttactccgcaagcatcgccagcggcagcagcagcccctccgacgacgcacgtccctcctccctctccgccgccagccgccgccggcctatcggctcccaccccttcccagagctctgcgctgccaccgccacgacagccgcttggaggctacctcacccagatgaccgctcttgagcgtcagctacgccaggccgagcaggccggcgacgagcgagctcgggaatcgctactcagggcgatgcagagcatcgcgtaccaggcgtggcttgatgtgcgtcctcttcttgctttagcccaggtcgtcgatcttcactgacgacccctcgttcgatctcctttggtcgggcagaacgtttacgtgtttgacgccccgaccgacagctattacttcctcctcctggcgctgctacgactcacgaccaacgacctgtcagtccctcgacgatcatccgagcctctcacccactgacgtctgtcgacctcctctcacagcgccgttgctctccacctgctcaactcggccaaggcgtcgctgaaagcgcacccctttgcctacccgctcgcctcgctcgtgtcgggcgtcaacgaagggcggcgggcggtctgctgggagtcgatccggcggctgaaagaggtcggtcgactgtctcttcactcggtaaaacagcgccagtactgatctgaggctggttcgcttggcgtgggcagctcttgacggcgattccggcccccaacgcagacgacgcagcgttccgcgccgtcttctcaacgatcctcgaggtcttctacagtccgtgactcccttcggcttgtattgctccttcgccgcagctgacgcttacgcgctctcccgcggctcggacaggtaatcaccaagagtcggtcatcacgctcttgagcgagacgtacgcctccctccctctccgccaattcgcggcggaggtcgacttgcagccgggagaggtcgtccagggttcgtcctatctagcgttccttggatcaatcctctcgctctcgctgacattcttggatctttcgatagctgctcgcaaccttggctggaaggttgacgagtcggccgggctcgtcatgcccgtcaagcgcagttcgtccggctctcccttcggcagcgtcgtctacctgctgatcgcacgcttctctcttgcactcgcagaggccgtaccgggccaggcgttcggctcacccgacttcgaccggctcgcccggcgtgtgctcgctctcgaagaggcaatccgggttgactagccggccgacgacctgcggcgctctctcttcaccacctgcactcacgacactccgcctcactctgcttttcgctccatgcacaagctctcaccccttcacgatgatgacgcattcacccatccttgccgctacaaagagcagtcgggatggccctggcgaacgtctccagcgcatctcaattcttcttgaaccgatcctcgagcatgaccggcctggccccacctgctgacccggggccctggccatcgagcagcttgcgcgcgcggacctgcatccagcagcggtacatcttgagctgcttcttgcggttgacgagctgcaggagggcgaaaagtgagggccggtcagtcgcgatgtttgcctccatgcgagcaaggaacaggtgaagaacgcacgagtcgccggtcgatcccgagctgctcgaggtcaaagagcggatgcggcgggtgccagtccgactgctggccgtcgctcgggaagtagtactctggcgtcgagaaggaggcgcttacgagcgcggcctcctcagcctccaccgctgcgccctcctgctcgagcgagagctgggctatcgacgcgtcgagggcggcaggcggggaaaagggctcgccctcggcaggtgtcgcaggcgtcgtcaggccgtcggtcggctcctcctccggggcggccgtcgtcatcacctcgactggcgcagttgtcggcgagcccgtaaagatttttgccaggtcgtctgtcaagcgccaggcgtcaagcacgtcagtcccagaaacagatggtcagagagtcgggtggaagggacgacacaccaggcgagaagaagtaaacgcgcgtgccatcgccacggatgtagaaatcctcgtcgagcatccggttcttcttgatccgcatctgggcaaggtcgtgtcgtccgtagtcacgcatgaggacgagcccgccgggcttgagcatctgtcgatcgaaagggctggggctcggattagctttggccagaatcgatgcggaagatggtaaacggaagcacgcacccgccaaacgttgttcatggctcgctcccactctgcgcccggctgcagcgcactgaggacaaagaccatgacagcaatgtcgacggatccaggctcgaccgactcagggctcgactcggacgagaggtcccagaccgcagagtgcaccttgccggtcggcgggtctttgtacagcgggttcgactgccgttgcaggggttggtgggtcagtctcggctatgattgggaagcaggcgggggcagtccgcaccttgacgacctcgacggccgacttggaatagtcgaagccaaaaaccgagagctcagggttctcgttgtgctggacgatggggaacatggcgttgccggcgccctaagcagagtgcaaaagacagaggatcagcagggtcgccaggcacctgaactcagcagcacgcacgcagccgatctcaacgatcgttcgacggccggcctgtcgaagagcagaggcaagagcaaagcacagaggttagccagctaagccagctgaaacacctatcgagcaaggaggcgcacgtcgggcttcgtcaactcgatgagttccggaaactcgaggcgcagccacttgcggtccttgaagaagctgctcgtggagtgcggcacggatcagtccaaagccatgacgggcgacacgaagacaacgtacccctcgagatgcgtatcatagaagcggtcccagaagcttgccggctttgcgttgtagacagctgcaggacgagaggaaaggtgaggccgggtcagcgacctgtcgagcggcgccccagtacctctacctcgttggcaaccgtcagaacgcacccttcatggcatccgtcacctggtgatcgcgctggagcttcttgacctcggcagcacgttcctcaagatcgtccggcggcggcgcgtggtcccaggctggaaggcacgtcacaatgtcggtcagtctcgaggcgcgacttgggccaagggaagctcgactgaccgttcatcgagaagacatcggcgtcgtccttgagcacgcgcgtcccccagtcttcggtccgctcggcagcaaccgttcccttgagctggtcgcgaacggacgacgccggcttgagcctgagctcctcgggcgacttgacgaaggcggtcgacgaggacgagggttcgggggaggcggcagcgactgggctagccggccggctggagctggcggcggcggcagcgggagtggaggaggtcatgcgtgcgagctgacgactgaaggcgaagacgagtgagagtcgaccggtgagcagcgtgctggccaagggcatggggcaaggttgagcgagcgacagaccggtcgtgcctgctcggtcggcgcttggtttcagccctcgacccttgagacctgtgggaaccttcgaagctggcctcgattggatggatttgcagtcgagcaataattcagcatctgccctctgagaccggcccgccgggtcatgggcaggttggccccgccctattagcaaaggcccacatgcgtcgtcgtcctacttcctccacacaagatgaccaggtaggccgagtcgtatgtcggacgagggctgcgagctgctcctgcctctgcgcgacggcgcgaggggaggaggttgtgggctgatcgcagccagcgaatcgcggcctccgtcgaccgtcagcgggtgctgtcatggacggccccgaatccagcactgacgatcgccttctcgtcgacggctgacgccttactttgcttggcgcacctcgctcacccgcccggacagtccggcgcctttcggggctcgctcccatttcgggcacgaattgctcggcggtgcacctctcctcctacccaccacccttctctcttacccagctcgcagcccttacagcccatcttctagccagccaacatgtcgatatcgccgacaccctcgtccatcgagacggagaagaagcccttctcggggcccaacgtcgacccgaccgcagccagagagacaatcgtccccgacggcgtcaagagccggcaccttgaggacgagctcgatggtggcgacagctcgctcgaagcaaccatctccgagcgcgagatgtcctggcagcgtacggcagtccttctcttcacggagtacatcgtgttgggtacgtcccgtctcgctctcccctggccgttgccgcctatcctgctgcgtcggaactgaccttccggcccgccctccctccgcagccatcctcgcctttccttactcgttccaggtcctgggcatggccggcggtacgattgcgacgctcgtcgtcggtctctcagtcctgttcacgtcgcacgtcctctggcgcttctgcatggagtaagtcgctctttaggagcgctcatacgccaggagccctccagctaatgtgctggaccacgacatctcccctgcctagataccctcagtgccgcgacattgccgacgtctcatattggatttttggccagaagcgcgtgtactggtacgctgcctttatcggccttgcggccaacaacctgttcatcgtgcgtgcctgttaggcgtcggagcccgctctcctgccacctcaggcatcggagcccgctttgcccgctcgcgccttcagcagacgccttcagcagactgctgactgcgacactctttgcttcatcctgcgttgcagatgggtctccactgcgtgcgtctcctcgacagcgcggcagtccttcgacttgattctgaccgatcaaccctctccattttaggtcgctggtgctaccgcaatcaacactttgggctacacaacttgcacgacagtctggggcgtagtgctgcttgtcatcatgtgggctggttcgctcattcgcgacctccgtcacacgaccatccttggcatcttcaggtgcgcgcgcgcgagcggtcgagcgatctgagcgagcgggtgctgattccacttctggacgactcagcgcgggcaccatgttcatctgcttgtgcgtcttagagcccgtcgcgacttccagctcttttgcgtgttgctgatcgctcctggccttcttctgtcgcagcctgattgtcgtcatcggccacggtgtccagggcacgcccaacggctacgtttcggtcgccgacgccacgctcgagctgcctcacacgcccctgacctggactgtttgggcgcctgaggggacgaccttcatccaggggaccaacgccatccttaatatcgtaagttcagagattggctaccgaatgaatcgggagcacggtcacttttaacaaataatctctcttcgcagctctacacctacatcggccacgccttgatcccgagcttcgtcggcgacatgaagcgcccgcaggacttcccgaaggcgctctacctgtcgatggccgtgagtcgctcttgatgcccgttgacgccggccggcgctcgtttctgaccctgcctcacccggccttcttcaggccgagctctgcctcttcacgctctcgggcgccatcgtctactcgtacacgggcacgatcttgacgacggcaccggcttacggctcgctcatcgccaagtacggccgaccggcggctgctttcaccctggtgtgttcagccgcagttgctctggcaggtgaacagcagcctacgtcgccgtcgctaacctcttagcaccctctaacagccgaccatcatcatcgttggcatcctctactcgctcgtcacctcgcgtgccgtcttcttccaaattttccctgagaactcggttcaccgccggacccacactgtcaagggctggtcggtctgggtcgttatcgttactgtcggctggttgcttgcctttgtcatcggagagtcgatccccttcttcaacgagtgcgtgccacgtttacttgaagtgttcgccggtggcttgagctgacagcttttcctcccttcagcatgctttcattgatctgctcgctgttcgacagctggttcgggtgcgtgctacgcgccactcccaagcaggccgtcctccctcacccttgctgatcttcgccctcccttccccttgccaccggctctgtgttctttcagctacatcttctggggtacgtctgaaggcttagattgatcgccagaacgacgccgctgaccgtcttcttgctcccttctcttccagctttcgctttccggctgctctacaagggccgctacaccgagtcaaagtggcggatgttcgagacaggcctgagcgtcattatgttgattgtgggcctgtttctcctcggtggtggcacctatgcttcggtggcctcgatcattcactcgtacaatgtcggcgccgtcaaggctcccttccaggtgcgtcccgtccgggtctggcttcggcacggcctcgcactgaccagcgcccacttctcttctcgcagtgcaccaacaccggcttcatcttcacgcgctaggcgcgcaccctaaaacgagggtgttcagcaccttcaggcccttcctcctctccatgttgtaacttctttgcggcgatcatccctacagccctctcaacagtctcttttttattgctgcccttcttgccctttcctctctgactatcgcattcatcttcgaccccgggcgagcggcgtcgtgtcggcagccaacgttgcgtcgatcgccgctgcgcagtcgtcttctggtgacggcttctgcccacgcccttcctcccttcgtctcgggcgcgaaaaatcctgcaattcggaagacgctatcaagtctggaagacgtcagcctgcttgcgccgatggcaagctgctctgccgcaaaagagtgcaagggaactttgacgagaacggccggacccgacggcccccttgacttctttggcccggcgcgcggcgcgcttcgaactctgcttcacttcgcgccctcgcctgccttccttgcctccttcccccctctcaccctcttctcgccattcctcttctatacacggcgcttggtcgaccgttcacgcctctccggacgctttctcgtcacccctcttacgagcgaatgtccctcgccggcccgctcttgtcgtcgagcattggtgacgccgccggccaggtcgacgcgagctcagcagcaggcactcctcgcatctcgtcggacgacctcgtgccgacgtcgcccagtcgtgtgaacggccagagcggcacctcttcgggccaaccgttagtttctggaacccgccaggacctcctgccgtcgttcgcgcccctctcccctctggtgcgtccgaagctcggcccccctctcctctcgcgcgtcgacaagctgcctggtgccctctctcccgagaaggacgcgagtactgacggccaacctgctcgcgctccatcttacaagtcgtcatcgccctaccagggctttgcgaccttcccatcgatgtcggacgacctctcgtcggcagcgtcgccccggtccacgtcgaccgccccgtcgcccttccgcgctcagccgccgccgcggctcaacctcccgccgctgcatctcgactcgtttcgccagcagataagcccagacgattactcgtcgccgacgcagctcagctaccgccggtcgccgtctcctgcctcgccccagatctcgccggggctcgcgagtccgacgaaagccggccgggcgatcgtcgtcgacgcaggcaggtcagccgagggcgagcagcgactgtcgccctcgggaaccgctcggccaggagacaggtctgccacaccgtcgtcgtcctcttcgtcacatgacaagcggcaggctatgccccctgccggccgcgcgtctttcgaccgaccgtcgtcggcactgccgccgctgccgatgagcgcgacttcagaccagtttccactcgacccgccgtcctcgaccgcgtcaagtccgacgacgacgctgtcttctgagcagcgagtactcgggcggaagggcaccattggccagagtctcgtcaaggcgagcaacgaggcgcgcgcctcaaactcgccgggcggtcgcaaccagctgatgcgcggcctcggcttcgtcgagtcgaccgaggaggagaagtcagaggcgacgacaccggtcccttctgctcctgagcctgagacgcccgagactgcgacaagcgggacctttgggccaccgccacaggcggttcgcagaatctcgacctcgagccacccgtcctcgccgccgccagctccgtcgccgactgggccgcccccgccggttccggtcctgtcgcgcaagtcgtcttcgcgggtcggcggctcctccagtcccgccggtcgcgttcggtcggtctcgcagcagtcctcctcctcgcgcgatgctcggccgtcgacggccatgtcgggcaagtcgtcggcttcgtcccagttgagcggccctgcctcgtcacggaagggcggtccgtcgtcggccggcgccggaagtctcgcacttcctcctcttcccgtgcctccgctactgcagggcctgcctcggagcgactctggcgtgctcgacccacgtatgctcgatggctccgcccccgaaacggcgtcgcctgaggaggtcctcaatgacgagcagccgccctttcaaggcaatggggccgagaagggcgaggtcaattttgccggcatcggctcgaggcacctcttcagcccgtcgcagggcgacatcaccgacgtccccgtgccctcgccgcccgtcaacaggagcagcacgtacgactctggcgtctcgcttggaccgacgccatcccagcgccgcgccttgccgcatcctccgaagcagggtctccttcccagccacccgcctccgccccaaccgcagccgtcgtatgcgatccagcagtcgccgccgccgcaaaagcagcagcagcagcatggctcgttccctccgcaggctcaagtcgcttcaccgccgacgctctccaagcggctcgtcgacctgaacccgcgctaccagaccggtccgcagggcggcgccgcctcggacgacccttaccaggcggctcgacgcagtctcgaccctcaggccttccagggcatgatcgggcaggtcggacagacgatcatgggcccagaggtttgcctcgagtacgtatcggcgcggcttccttccttcctcgcctgcctgatccctgactgactcgcctgtgtgctcatttacagatgcatgatgcgcgaccgcgacctgattcatgtcgacgttagttctcctggcgtctgggctcgccactcggacgccgacctctacgacctggctctgcgcgaggccgacggcgaggacgtcaccggctttatggccggcggcatcacctgggagggcggcggaccgatcggcatggacaaggtgcccggcctcaaggtcaaggctcggcggaccatcgccggcgaccgcctgaccgaggcagccctgaaagaatggacgctcaaggtgcgtcgctcactctccggatatggcgtcgaacgctcaccgtctgccttgcctctcccagtcacccccggcggcgacgcaccgcttccagacgctgcagaagtacctgctcggtcagctgcgtctgattgcagagcttgccagtcctggctcgccgacgctgctcgccggcgtctcgaacgaggtcgagacccgggtgctcaagtccaagatccagaacacatttgcgccgctccgccgggacgagcccgtgacaatgacgccggccgatgccgcacggatgcgcccggccaagactcgccagggccttaacccagacagcatggttgagatcgagaattatgatggcaagccgtcgttcgaccacgagcgttcccggcggcggagtaccggagtcgagctcctgagcaagcacggccgatatggcgttcccgacggcgccggtcctacgccgccgatgcgcgacgtctatggccagatcccaccgcaacaggcgcatcagagcttgcgttcgacgacgatgccgatggcactgccctcatcggcctcagccagcaagtttcccctttcgcgaggcttggccgacgacggcaattacaggccgtcgtcgccggcatcattcgcgacgctcaacatgccgcgcggcgagtcggacttcatcccagatggcaagccggtccggccgttttcgttcgcgatgtgggccggccgaacgcggagtagcagcaacgccagccaagagggtactcgaggcggcatctttaagggccgctttggcgcgagcagcggccggagtgaggcgagcgacacgacgaccggcggcggcggtcccagcggcagtgcttggggcggcagcggcagcatgatgaacatgcagtgggtcttctcccgctgttctccaccctcaatttgcaccgtcgactgacaacttctttccacgcccagcgtcgccctggaccgcgaccaggagcgccaggctcggcagggttttacgccacctcagcagcagcacgcttcgaccgacgcattgaaccagcgctggcgcaacgacggcgacaacttgtcgtacgccgcgtcctcgcagttttacccgtaccattacccgggctcggagccgacgtcgccgggtcggaccggccggccgggcgctccgcccgcggcgcagcccgagggaaagaagaagaagaagggcttcaaggccttcttctctaagcttggcggcggctcggtcaagtcgagctcgagcttcggcaactcgccgcagctcaccagcggccagtttggcgggccgtcctcatccctcggtcaggcttcgccgatgccgggcgaccctgaggagttcggaccgctcgctcccccaccgagtctcaatttcctctcgcgtggtaagacgccgagctcatcgtcgctcagaagcctgtcgtctggtcccaactcgccccgcggcctaggtccaactggcgcagaccgctccacagcaggatccatctctggatcgtccgtcctctcgagcccggcgatgattgtcccggccctgtcgtctggccagagcttctcgtcatcgcaacacccgcgatccgtctcgacgccggtcaacgtcggcccaagctttcagcacggcaaggcgccctcactctcgccctcggccgccccatccgctacgtccatgtctccggcctcaggctccttccccgtccgtcgcggcagccgcgacacgctcggcagtcgccagagcatcctcccggctgggcccgaggtcattgatggcctgccctctgcggcggcagcggcggcggggcgcgtccggccgagccccggcgcgagtctcaacgaagatgggatcctcgccaatggccagggcgagtacttcccgcccggcggagatgcttggcagcagcgtcggtcgtatgcagccgcagggcccagctcgccgggtggctatccgcctacgctaccagcgaccgcccatcgcctgtcggtcgcgtccggtcctcctcagcagcagcagcagccacttgcggcggtacccatccccaacccaggcttgatcgctcaccgccgtcgatccagcaacttccagaaggacctccctcccttgcccccggcgtcgccgaacccaccggccccgctctcgctcggctacccgctccagccgtccttctcggccggcggcatctctggcctgggctcgaacggctggcccgcgtcgcccggctcgcccggccgggaccagtcgcagacgaccgtccgaagcaacggcaccgacaagagcgccggcaagaaggagaagaaacgcggcaagctcagcggcttctttggcgtcggcggcagcagcagtgccggagccgtgaagaagcagtcgttcgaggcgccgcgcaccgtttctcgcgacgaaggaagcctgattggtgcgtctgcttctgtctcgcccgctgtgtctctcagccgctgacgctcccatgtacgaaacaggttaccgctactcgtcgcacgaaaagcagtaggctgccgtccttctgcaactttcccgactcttctgcctccttacaccccatcgctcccgccccatgcatcgtccgctttcccgcgccccttactctgtcgcaacctctgcactttcacgaccgctatcccgcccctgcatttgcaatggctgcttgatccgaacgggcgcgcaaaagggagcatcggatgtggtgggcctccggcgctgtcagccgagcaggcaggccaagggcgggctcggctgtgtgcggcccccgtcatcccggtcgagcctccaagaagatgccgcctcaagggagggagcgagcctgaagaaggtcgctgcaccgggcggtagtgcgaggcggcctcggaaaggcgcgacaggctgcggccgcaagatggcgctgaagcaagcaacggcggatgggcgccaagggcgatgaagcgacaggtagcttagcattagctctggtcgatgaagcgcagcctgatgcctcgcgcccgggcggccgcctccatcgctgtgaggttcaagccgatcaaagtcagcgattaacgagaggtatggtgcttacccagctagactgacctcgcttctccgagtcgtcttggcgacggtcttgctcgagcacgagcttcttcatcatcagctgctcttgcttgtcgagcgcctggttcgagcgcgtgctgacagcaatcgccgcgttaaccgggatgtccatcatgcgggtctgccggcaggcgagggggcggtcagcgtccagaggggtcgacagagcaagcgaagacgacgcacctgcggcttgttgcccttctttgtcagcagcataaacttcatcgagcttgcaccggcctcgtcggagccgtcctgtggcgtgggctcatcgtctgccgtcgccatcccgcgagctccgccggctggccgcgcccggcgcatcagcgggacggccgtgtcaaagacagggatgttaagcttgcggtcacttttcttgctgtcgctctggtcgacgagcagcttggcaaactccttgttgaactcgtcctcctcctcctgcgtaatcgagtccttggcgaggttccggaggacaaggtcctcgtcgccgtcgtcaccagagagaacgtcgccgtcagagactccgtcggcctcgtcctctccctcagaatcgccgtcgtcgatccgggcggtctgagcgacctcctcgccgagatcgtcgtcgccgtcgtcgccacctgcgtcggatgactcatcactgtcgtcggcagctgtaggaccgaggaccgtcgtttgagtgatcaggagactggtcgtcgcctttaggagcggggcagctgaagacgcacaagtcggctgcagtgcctgggttgccatgagctcgtcgacagcacggccagcgtcgtcgaacgtcttgaagagcgtcaggccgggccggatgagctcaaatgtgtcggtcagcataaagtcgacgtccatcggcgtcggctgcttgcacaaaacgtaaagctgggagcaggagaaaggtcagaactgccggctgtgatctgttgacacctcaccggctcacctggaagatgacgaggaattggtcgagcttcttcttggctgagcccttgtcgaagcacatgccgcatgtgtcgagcagagtgcagatgagtcggacgcggaaaaagtcgtcggccgagtcgttcgggcacgaccggcccggtacgggaagcggctcggctgcgagagaggccgaaggaacgatgtcagattcgcaggtcaaggacataggaagcgtctggaagaccaacagtgtccaaacgtgatgagcgaccagagtgtgtcgaagatgacggccgagttgacctgccggaagtagtgcagctcgccgaggaacttgatggtcgcgatccggcgctgattgtgcttgaagatgttggtctgagagaccgggaaggtcagtgattgcaagcgaatatcgaccaccgtcgaatgcggcgtacctcgagcccgctgcggatgttctcgagcacctggtcgacgactccggtcgcaaagtctgattggaaccgcgccaggtcgtacaaaacgagcgcgagcgcgccaatgttggagaatttgagcttccagacgcgggtaaatgccttgtgcagcagctcgtagacctggtgtggtccaagaacgtcagtgcgagctcgacaaagcgcgaacgaccattaactcgcctcgggatcctcccagtggagcttccggacaagcttcaggactttgtcgaccgtcttcttgatgaggatatcgtggatcagatgccggatgaagagctccatcggcgagcgctccttctgctggacggccagccgctcgggcgggttgcactgtacatgaaggaagagcgagtcaggaagaagcagacctcgcacatgagagctgcatgcgcacctggtagtaggcgttctcgaggagcagttgcaggcgctggtcgagatgctgagcgttctgctttcggcgcatgagctcgagctggttcgggtgatgaaaaggcagagcggagatcagaagattgcccccctcgaaggcacggcgtcggacgcaccattgccttcatcttttcgctcgtttcctccgtgcgaaggaggaagcggccgcagttctcgagcagcaaggccgcgcactcgatgttggttccgctcaagtcgtcaataaggaccttgtagacgtgcaggatcgtgtgcggcttggcgatcttgaacttggcgagctccgagtagaagcggatgttcttggcgcgcacctcggcgagttcgcgcacgagcttcttgcgctggaggtagcgaaactcttcgtcgagctgatgtcacgggtcgcagatcagcatctgccgaccagagccagcgcgggcttgttttgagcacgtacgacggcgatgatcccaggccccaggtccggcatgtaagggtcgaggacggcaatcatcctcgaccagattggaagcaggtcggagcggttcttgggcacggcgccgatgcactgcagcggcgacggaggtcagcggcggcactctagcgacagctgcaaggtagccgcaccttgatgagccgcttccgtgatgccttggagttgaggaaggcaaagtcgaccgccagctggtcgatggccgacttgctcgagacgtcgggcagcgcggcgaagacggcgttgaggcgggcgagagggccagaggcaaggttggtcgaggcatcctcgacagcggcgacagccggcgttgagctgtgcgagcgttcaaaggtcagacagggtccgtcaccctagccctgagggagccgcataaagaggcgagacttacagctcggccagctcagccttcggagaggcgtcgcgcgagtcgccggccgtcttgcttccgatggtctccggtgcaaccgttgctccattcgccgcaccgttctcaaatccctcaagctccctcttgacctgctccatcatctcgcgctcgcgctcctcctccgccagccgcgcctgagagtccgcatccggcttgtcggcctcctgatccttgctctcgacgccgagtaggccggtagggacgagctcggcgagatcgggcaggtcctcatagaagcgccgctgctcgtcgtcctcccacatgccgccgagcggaatgtcctcgatgccgccgcgcgaaaaggggttggcattgtcgagaacaaggacagtcgacgtgccctttgacgcagccagcgtcgggaagacgggtgcaggcaggtgaagcaggtccgcaagtctgagagcattaaagcagcaagctgagcgtcagccggaaatcaggggaagatctgtgcaaagaggcccttacgcacgtcgtcatgccggccatcagacgctctacctccttcgtcatcttctcgtaagcctgctggcggtcctcaaagatctcgcccgacttgatgtacgcctcgtggttcttcaggtcctgctcttgcaggcgctgtgaagcgggcgaggccaaggtcagtcgccgtgccaggggatggagctctaacggctagagagggcaggccgcactgtccggccccggtggacattcttgctgagactgtcgtagtatgccttgaaggctgaccgcaagccggcctggatctcagcaggtacgagctcggcttcgccggtgggcgcagcaccctcatcggttggcgcagtcatggccgcgccgggcccgaggtacggccgagcaaacgacttcaggaaggacgtgatcaggggcagcgacgagtagattggatccgacgcgagctgccaatgttaaagggtacaggtagtcagtggcagcttgaatgacaggtccaaggcgcgacgcacaaggcccttgacgccgtcatcagtgcaccacacctcctcgcgctcgacctccttgcccttgcggccgccaccgccgccggtgctcatgcggaggccacagagctcggcctcagcgagtgcacggaggacgccgcgctgcttgacgacacgttccttctcctcacggtcgcgctgctcggccgggagcgacttcagggcggcggccgacggcggggcgagtagggccgacagctgcgagagaagcggctcgagaaaggtcgtcgatggcagccgacgcgagagcgctgtcaggatctgagaggtgccaatggatcagcccggggcgacctgacgaagaggctctgtgaaggcaaggcgaagacggtagggaggcgcacctctgcgacggcgagcacgtcgccctttgcgccgaggccactgacgccctcgacgcaggcgtcgacaatttcctcggtgtacttttcgagcgtcaggccttcaatgtccttaacgagcacatccttctgatcgagcgagaagcccttgcggagcttgttgaggagcgtcgtgtgccgcttgagcgacgagtcgagtgccctcgtcggcgtcggcggcggcgaggctgggtcgacaagccgggcgtgattgagcgcaagcagcggcgcccgcttggtccgcttgagcgggtcggccggcgacacgagtggcggatccgtcgtcgacatcctgtctctagctgagaatgggtgagcgagaggcgggagggcgatagtgtcggagaggcaagacggtcgacgaaaccgatctcgcaaggggcagctcgaagctggccgcgcaggcggcacggatccccttaacctgctcctctctcccatcctcatagacaagcagctcatctggcgacaaggcaagagagagcaggatgcctatccccgtctactcagcgcccgagatcccggtcctgcgccgatcgactgtcgtgcgtcgcccatggcctgcgctgctccccgcctggcctccacttcgctcggctgacgtctctgcttcctgtgccgtcagcaagcctgccgcttctcgagctggtacccgctctttcgacgaagatcgattcggggcgacgttcacaagtttgacgtcgaggaggaggccgccttccgtgcctggttcgacgaggacggcatgcgcctgcccgagggcgtcgcggccgaggatgagttcgtcctgcaatcgacctcttgaccgacgacctagtgctgatgccgtcctttgggagcgacctcagatcgcagctgtcagactcggatagcgactcggtcgcatcgtcgagctcgtcctcctctgacgactcgccgcaggccgagcactcgttcacggccttgaccgagctcgttcagacgctgctcactacgcaccggccgtcgggcctctttccaaagctcaatacgacggcgcctcaggacgcccagtggatcctgccccttccccagccgctaaagtgctcgacggccgaagacgtcttcatggtgctcaaggcgtcaggcctcatgaacggcgtcgtcgagggctcgctgcttacgggccgatcagccgaggagcgtggcggggtcgcgcaggaggcggaaagcgaggctgagggcgggatcagcatcgacggcgtcgtcgaggacctgtcagagccagagctcgcgggcgagcgcatcgaactcgtgctcaagaagtggtacgacatggaccgctcgcgtgagttccggctgttcatccgtggcgacatcctcctcggtacgtttggctccttcgggctctgtttactttccagtaattgctgacacgaagtcttgcgtttcctgggcgccaatcacaggcatctcgcagagggacacgaatcactacccgcacctgctggcggccgacatccaatcgaagatcaggaatgcgctctcgcgcttctttgacgagacggtccgctccaagttcccgggagggccggattgtgcgtagagcttttcccgcttgttgcccttcccgcagacgctaacctggccgccctcgtcagttgttgtcgacgtctacctgaactcggcactcgacgcggcccacatcatcgacatctcacccttccaccccttccagacggccggctttctcttcgactactccgagctccatgcgctcttcctgacgacgctgaacccgacggccgacgccgactccccggctgagccagaggatgaggttctctacctctcgccagacgcgctgccgatcctccgcgtgatcgagtcgcgaatgcacccggcggccgcccgcaactcgccagcgtacccggcgtatccggccgacgtcaacatggtcggcggcgggcgcgacattgaggagtttaagcgcgtctgggagcaggaggtcgccaaggcggccgtcgacgccgacccataatctcgatgagcgtcaaagggaagaggtgttcttgaacagcgagtgctctgttgccggcatgtgctgctcgcgtacgcaagtccggtttgccttcggcaccgatgggcgtcgggtcggtcggcgattctgctgcgcgcggaccaagggaccgaagccgcgtccgcatgcaggtcagcccccgctccctgcctctccccaacagcaccttgtcctctctctctggtcgacgccctagagccttcttctcttgccgacagctagcagcatggccagcgcatctctgaggaaccgcaagtcaaacggcgccgggaaaggtgactgcgtccaggctggcagcagctcccccttccgaggctcgttggctgacttccaggcaccctccgaccaggctcaccggctgcctcgacgagctcgttgattgaggagctgcacaacggcctgacgcggctccagcggacacgtgagaccttgcttcgtctccagcgaatagcgcgaccgatgagaaactgactacctcttgacctgctcctcctggcgtcgccagctccgcgcgagatcgcctcgccgccaacgcaacccggccgcgcctcggtcgccatctgtatccgcctcgtccctgccgacggaagctcggccgagcaggaggatgacctgcccgagacggtcgacgacttcttcaagcaggactggacgcggagcgacggcgtccgggccgaggtgctctacatccggcgctccaagtccaagggcgaccgctggtcgagccaggtcgccttccctggtggcaagaaggacgccaaggacgaggatggcctctacacggccaagcgcgagacgtgggaagagatcgggatcgaccttgccgacaagggctggctcaacgtcggccggctcggtacgtcggcccgcaggcgtcgcagcttcggatccgtctctcgggcggcgctgaccgccttctcttacttccgacagacgatcgcgagatcacgtcgtcgatgggcaagcggctgctcatgatcctctcgccttatggtgcgcttggcgggccttgtagcgtacgccctcaggccgggcggctgaccgctgcattccctcgcagtcttcctgcagacatccaagacatcgcccgagatctcgctcgactcgcacgaaatctcgactgtgcactggattccgcttgaatcgcgtgcgtacgggcgctggcgagcgtgtgcagagggccatcctgactcgcaaaccgctcccctcttggcagtctctcccaacccggcctggggtcagatctcaatctcgctctcgccccggctctcgccgcgcaacgtcctcgtccggcgctttgtccacctctttgtcggctcgatgcagtttgccgccatctgcctgccggacgagccgaccgctgcggcagagggctgggtcgtcccggacgtctcgcccgaggtcgaggcgggcggcgacgccgagggcgcttggtatccgacgatcgccgtactcagaggcaacgcgaataccgagcgcggcctgcgcctctggggcttgacgcttggcatgacaatgtgcgtcgacgctgtggctgggtctgcttggcgcggccatagactcttgcagctgacgccttgctcgcctacattccccagtgacctggtcagcctcatgcagctcccaccgatagacgctcccgagccagagtacaagtctcttctgccttacacagtcccgtcgacattcggcgaggacgcgcctcggccaacgtcgacgcgcgagttccgccgtggcgccaagggcagcactcggaagggcgcgaccggtctcaacgctggacttgtgtacgtctcagcatgctagggtaccgcctctgatcctctctgaccggctcaattctctcacatagctcgattcttccgcgcttctcgctccccgacatcgatttcttcgtctggtctgtcttccgtcacactgccctcgctcgatctcaggcggctaacagacagcctacgaccgtttcctcgcacggcagggtctttggccggcgctaccgctccatcatccgcgcctgggacgactcgctagacaagcccctgcgcgagacgggccggcgcgtcaactggtcgggcgccgcgctcgccgccttctactcggccgtccggagagccatcatatgtgctatcgtgtgcgtcccctcgcgcgcgagaggtccgactctgctctgcctcggctcgctgatcattcattccctttcgtgcttcagtgtccgttcgatctcgacgctcgtcaccgccgctatcatcgcctactacctctggctccactttgccaacgctcagtgagcgtcgcccggaggtccaggcgggccgggcttgtactatgcgagcacgcacgcgtgtgcttcagaccatactcaacgatgtcgggcgatagtggacaggctttcatcgcgcaccaggcgcggcgcgctcagtgaattcgcatatttgggaaaagtcaagcataaatagcgcgagatcacgatcagagggatggtgatgagcgagagcatggcgcctgagacggacaagaggcagggtgaagggtcagctttatgcacgacgagagcaacggcgggtcaagagaaggcaaagctaatgaaggaggtatcagttcccgcggctaagcgggcgacgtatggtctcaacaagggcagacagtgcccggggacccgtccgaggacggaccctggctgcggcaagccctatcaggggattgacagatgtatcgggtaatcgtcatttggaagagggaggaagaggggaggggaggggaggggagggcgaaggcgggtacgcacaagtcgaacagaccgaaggccgcaggaagcgctgtagggaagggggcgaccttatgtagaaggcagcagcaaaagtcagtcaggcgatggtcagggaaggtcagagcaggcaggacggagtggtcaagggaggtattcagcaagaagttgtccgcatgagccaccgctgtgggtgactcttcggcgacaataaataaaggtatcatttggaagggagcgggcgaggtcgagaagagttgggcgtggacgtacgaggcggcggcaggccaagagtcgatgaaggttaaagggaggaagaggtcgactggtcgagctctccggctgctgcctagaaaagagtctggcaactcgcatctgcagttctccagggcggcagcgcgcagccgcctgccatcccgtcgctctgcgcggcccggccggatcttgaagacggtcgtcaccagctactgctggaacgagagcaggaagatggaaaaggcaagacaggctgcttgctgcccactaacggccactactcaccaatatgctgcctcctctcatccggccagccatcgccctccgacatctgccccggccctcggcctgccggcggcttgtgcccgttgtccttctcttcgccgtcctcggctcgctcgctctcgtctttgggacgctcgtcgacgaaccgcccagttcgctccttggtaaaagccctaccggccgctggacgctcggcctcccgctccgtagcatccgcagcaagagcagcaagttgagcgcgctctcgccgacagcggctgtcctccagggccggaaggagctcggctcggacgggctcgagaggtggaatctgccaggtgcgaagtcctctgccctcagtcgcgctgctctggttagaggctgacctcttctcaccacctagatcgcctgctcccggacgagcactacctcgtcaccggcctgatcgccggctggaccaaccaggtcatgtcggcgatccactgtacgtcccaggctacctattgccgctaggggcgcctgactgacccagtcccttgccatagccatccatctcgggctcctgacgaaccggacgaccatcatcccgtacttccacggctacgcctcacagctcggcgacacgttcgtcaccgctcccgtcccgaatctcgccttcggccaagtctttgatctgccgcgactcttcgctgcgatgcagccgctaaaccctcgcacgctccgcggcatcgttgacgtcgccgagctgctcgagatcaaccgcgacagcgcgacgggcggccggggctggccgacgctccactggccgacgccccacgtcgtcgtcaacgcctcggatgccgagccgtttggcgaaggttggcgggacgacgtcaacgaggtctgggcgctcggatgctggcgggctcaccgtggagggctcgcgtaccctctcgagcggatccggatcgtccccgactttacgcgcctcccgctcgacgccatgccgcacgatcctcggctcgccgtccagtacccgatctggtcgggccttgaacgctacctcggcgtccggtccgatacgaccgccatcgtcgacaaggccctcggctcgatgaatgcaagtgagcggtcggcgatcctccggccgagcgagcgggtcgcgtgcgtcgactcgctctactacacgacgagcggcccgacgcagtcgctctggaactcgtggtcgacaaccgccctggcaaagacgacgatcgacgacatgactctcggcgagatccctccgccgtcccggcctgcgccacctgtgatcggcctcgatgcccccggtccctgggagacggtcggccagcacgctttctggctaccggatctccaggaaggcggcgaggcactgcttcggcacgtcctggctgttccagctggagcgcccatcccggccttcatcagcgtccacatccgccgaggagactttctgaaacggtgcagcgacccgcgcgagtcgtgcttctcgctcggcgccttccgacgggcggtcgaagcgctccgtcgtcggctgctcgccgagcgcagtatctgggtcgatgccgtcgtccttgcgacggacgagacggatccgacgttcctcgcagcagccgaggcgctcggctggcgtcgcgttagcgaggaagcgagcttggccgttcggcgcgagcggggagattggtgagctagcgaattagcccccccctcgccacactcctgccgctgacgcctcttgactgtcgcaggtacccgatgctgctcgacaatgtcatcgtgcgccccattattcgacctgcgttttgcgcagcagctgaccctcgacgaccctcggccagctctcgatgggcaaaggactcgtcggcacggccgactcgaccagttgcgtctcccatctctcatttttgagagtcgatcattggctgacgatgcttgtccaactcgccagtgtccctcctgaacggccggcgggttgaggtaagcccggctgcgccaatgaaagttgagcgtcggctgacctcgtcatcctgcccttcgcagacgtggaacaatggcctcgcagcctacattgacaaaagcgcgccgtcagcctgaggtcgctgctggcggtcctttccacgaccccctcttctttgctgatttctcactctctggtctgatgcgccttttcccgctttctcgccgaatctcggttgccgctctgcaagaccatgccattctgcggagccgtggagcagagctcactagaggttgctcgcgaccagacggaggatctcgccggccggcttgccgaggttggcgaggtccttggcgacagcctgccagaccgggccgtgtcgcgggtctgctgccgtgcacttgtcgatgacggattggcggcgctcctgcgggggcacaatgtcgagcggtcagcacttgtctggcggcgatagtcaccagcagcagcgcgcaagacacacatcctcgccgtgctccatctcaaacttataccaccagccccacgagtcgccaaggtccttgtcggcgtcagtcgcccggccgaaccagtgccgggcgcgctcaaccttgcggtcggcccagaagaggcgggcgacgacgacaatgacaaccgggtcgtcgtttgtccgcttgagtgcgtcggccgccttggtcttgcgttgcggccgcggctcgttccagatcgagatgacccacagccggcccgacgtcgggcactcttgcaggcctgcggaaggaggcggaccgagtgtcagtaccgagcgaggtcggcgaagagatttcctgcagcccgacgcacctcgtgcaaggacgttccgagcttgggccacgctcccagcccgctcctcgacgcgaacactctcctcccagagctcggcctctttcgggttgacgagcctggccttctcgagcagactgcgcgccttgatgacgacgccagcggcctcctcaagtcgcgaggccaggatccagagcgggaccgacttcggacagaccttgacggccctggcgtacgtctcgcgcgcgagggcgacctcgccccggtcctggaagatttggcccttgatcatatagagcttgtcaaaggttgagaacttggcgataccctcgtcgagtgtcttgagtgcggcgtcgactttaccctgctgccgctcgagcacggcggacttcatccagatctgacgggtgcgaggaacgagaagcgggtcagcgcgaggtcgaaagtcgaccgtctcgatacgcgacgcaccttgtcagtgccggcttgtgcacgagcgttggcgaggagttcgatggcccggtccatcgcgccgttctcggcctcgagcttggccgccgccagccagaccgactcggcctgcggattggcccggaaggcgctctcgagcgtcgagcgcgcgccagggacgtcaccatgaagccacttctccttggccgccatcagccagaggatctcggcccgcgggcagtggacgacggccttagcgagcagagcttgcaggtcgtcgctgcgagaacagggacgggcgatcagccggataaacgaagcagacaagccagaccgggggacgacgcactatgttccgtgagccttctcgaactgggcggccgtccaccagacctggcgccggtcggggaagacgctgatcatgtaggcgcggatcgcgcgactagtctcgaagcggccgcgcgacgacgcgccgtctgcatcctccatccaggtgctcagccgcgagtcctcctcgacgtcgatgtggagcgcagctttgatgatgccctgggcggtgacgggactgccctcggcctcgcaccgctcggcctcgctgatccatacctcgcggccgagcccgacctggagcgactcgagcttctgaacgccaagcgccatgatcttctcgactttggcgacctcgcccgtctgctcggtcagacggccggcggcgatccagatctcgtgcgaggtcgggatcgtcttgcgggccttgttgatgaccttctgggcattctcgggcgtctccagccgggcgagcgtgagccagaggtcgaccgaggtcggcacaaactcgaccgcacgcgcgagcagcacacgggcatcagccgggtccgtctcgaggttgaccgtctccttccagagcgtgaccgagttcgggatcgtctcgacggctacagaacgggcgggagcggatgggtcagccgggcgagcatcggaaaggaggcgaatgaagcagaagaagggtgcgcacccttccgtagcacgtttttcttgcggttgatgtcggtctcgagcgaggccgccttgagccagatcttaacgctctgcgggatctcgcgcacggcgttggcgaggatgcgcttgctgttttctgggatctgcatcaggtcgcgagaaggacggtcagcttcagctctgagacagatgctgcagtaggggcgtcaggcgacggacgttgagctcggcggcctggagccagacgtcctcgctcttcgggcacatctcgcagcccttggcgatgattttgcgcgcggcgaccatcttcttggcatgaacctcgagtgcagccgcggcaatccagcctggagcatgcttcgggttggtcttgatgaccgagtcgagcagcgcacgtgcacgcttgatgtcgctgcgggccgatcgaagcgtgtcagcaggcgggatcaacaaaggcaacagagcgcttctggtgacgtacccaatctgcgcatcggactggacaatcatgctgttgaggccacttaggtagcccttggggtcgatcgtcgtcgacaggccgctcgctgtcgcatccgaggcactctgcgcagtcgaggcaagcgatcggtgagcatcagcgcagcccggtcgaaaaacagaagagctcaagtcacgcacctggtcgagtttgagcgacagaaccttgtcacgagcgttaccgatctcgacgaggtcggtcattgcgccgctgccggggttcgcggcggtctgcgccgggggaggagcagacagaggtcagccctgggcgctgactggcaactaggcagacttgcggcgcaccatctggtcctccgacagcgcgccctcggtctgcgactgggcgagattgctgatcgttaccgagtcgggcacggcaaagtcgcgctccatccgcgggttccgcttcgtcttcttgcccgtcatgtttgacacccctggcaggttctcccactcggcgtcggtgacggctccgaggccgcgcttcaggtcggcgaatctgacagagggaagggcgagcgattcagctgcctgaggcggcgcatgcttcgacggaaggacagtcggacgcactgcgtctggatcttgggctgggccgcccggaacgccttgagctgctcggcctcggtctcctccctccgccgcttccggcgctcgtcgagccgctcgtcgacgctctcccagacccggtcggcctcctcgtcatcctgctcgtacactgtgcccgcaaagatgttggactcgtcctccgggtcctggaactggtccgggtccttgatgatctcctcgccacgcccgccgttcgctgcgtcgccctcggcggcgcccgcctcggcctgcacacgggccggaccaatgtcagaccgggttgtgaagccggatgctctgcagagaggcaggacgcgatgggtcagttctccaggtggcgaccgccaaacgggcgcctcgggccggctcgctcggcagcggcagctggctcgagcttcgatgggacgcaccctcgaccgagacctccaacccagttcggaggggcgacctgggtcaggaacgcaagccggttggtccgaccggcagtcgagttcagtgcctggaacgagttggacatcgtgcggcgttgatcggggccaagagagtggccagtcggcgggccgagagggttgaagaggaggaggtcgccgactgctgagccgaggacgcggtggccggcggcaggagagtcgcccgagacaaaaagattgctagatgctggcgagctgacacgagctcagaagattgccagagcgctgcgagagagggggatggccgggctcagggcaagggttcgttgtcgttggcgggcagcgaagtccggctctcgagttcgccctctttcgaccccgtcctgtcgtccttgcccatcaaactcccactcgggcgggctggccgagacagcagaacccctccgagcaacgctgacgtcctggagagtcgttcatcgaccatgttggctcgctctccgcttggcaagccaccaagtctctccccctgagtggcgggtcgctccggccagcccctttggcggcggcggcggcggccgaaacccgcaggctcaatccatcacggacccccttcaccacgtcgctcggcccgggtcctcctctgaggggcgggaggtgacaagctcacttcgctagctcgggtgatgctgaattctcgaaaggaggcttgcgtcgagggagcggcggcgtcctcttccctctgtcctctacaccctcgccgggccatctcctcgtgagcgccttccctgttcgagacgatgcggcttcgagctgaccttcaaactgcagctcctcttgcgcagcgtgaccttctccagcttgccgaactcgatttgaggccaatcctatcgtgcgtgtcgctctcgatccgacccggctcgccaacggctgactctgagcagtgcgatctgctacagaactccctttggtttcatccggaccaccctcgccgagcatggaccggtacgtctgctcgagccctggaggagcgtcaagtcggaagagcgaaaggctgacgctcaggcactgcgctcgcagccttccgcctcaccctcaggcagcctacccatcgacgcctccgcgccagggcggccatagcatgcgctcggacgtctcaccgcagttcgtcctcgaggatgaggcgtactacacgcagccgccaaggctccttcacgacggcgcgtcggcctactcgttctcgtcgacagcgtcgtctggcggtcctctgacgccgcaagcagctcatggcgctggtcgcgactactttggccagcatccggctgccaaggaggtcgcctacgcaaattatgctgcgccccagttcccgactcggtcgcaccagctcgagggccggccgggctctgccccgctgatgatggcgccgacgtcgttcgactcgtcactgccgtcgctcgcctcgccctttgcccaggccccgcctccgtcgcccatcatcgcctggaacccagtccagcggcagaccggcggcgatgagaatgacatggagacgctcgtcgcccggccccgagcgcgcccgacgatggccggtcgcgacacgggcgaggagcgcaagacggtcttttggcggcgcttctcgctcgtggtccatcaggccgagcgccagcccgagcagtcgacctggctcagacggcacgatggagccgttaacaatatccgcgtcatggcctgcgtcggcctcactgttgtctgctgcctcgtcggtgggctgctcgcctggcattacctcgaaccctcgacgcgacccagaactggcaacctgtctggcctcatcgagcgaagcacggcgcctgacgctgtcgatctggccgcccgcgctccgttccgctcattcctcgactcccatggccctagccctcacctcggtaagggcgtggcccggctacggcccgaggcttgaagcccggcctcgacctccccttatcgtatgatctctcccgtggttaataatgcgcttccgccgcggcatcccctacaacgagggagcatggatatctagcggatctcgctagctgctccagctgtagaagccccagccgagcgccccttggtcctcctcgagctcgacgacagccttgtcgccgaacgcggtgccggcgcccagggcgacgacgacaggagcaaagtggtcgtcctcggggaccgcccgcttataatctggccagcgtcggacctcctcgagctcagatgcctcgccggtgctgtcgcgaagccagtggccgacgcgcgcgaggaagggcccgccgtaagggcaggccttgccgaggtcgcgcaggttatggaccggctggccagacgcgaggatgaggaagccctgctcgaggaggggcgccagggcgcggccgagagcaagcgatcgttcgagctggtccgtcgatgattgacgagggagcgaaatctggagcagtggcgctggaggagggttcgacgacgggaaggcaaccttgagcgggacccaggcgccatggtcgagcccgcggcccttgacgccctcccacttgacgccggcagcgtcgagagcctggccaacctcggcaatcccttcttgaccgagcgtctcgtgtgggaaggtctgcgaatagtagtgtttcggaaagttgtagaagtcgtaaatcagaggcgatggggttgtattaactgcggcagaggttgcgccgttagccactatacccagtgcaaggtgcaagtcgagccagaacgtactcttgatggcgtcgctctccgactcccagtgggcgctgatgatgaggatgcccttgaggccctccgagccttgctccttcagcgccgcgtgcgctcgctggatcgttcgcccggtcgccgcccactgcttgtgcgcgacgctcgccgtgtcaaacaaagtcggagggccctagagagcgcattcgtagcgtcagcttaggatcggagctcagagcaggcccgatcggtgcgagacgtacgccgtgcgagatgaagaggacgggcgtcttgatcgaggttgagccgggcatcgttggcggctgaggtcgggggctgaagcgcgagatggtcgggcgaagagcaggcggcaggtgcgagagcgtcggaagctgcagtgcggaggcgattgcgagcgctgcgaggatggcagcaaaggagaggagcaggtggccaaggaaggtgcgtgctcgagctagaggggcagaggggggggtcgcttcggagggacgcgagggcatgagaggtggagagaggtcgagaagacgtcgtgctcttgagctgtcctcgcaagccgtcgaggcgcggttccagtgagaggtctcgtcagcaagcgggtcgtcggcaggcgagaaggatggctgtcatggcgtgcctgtcgaggagagcaagagcgtgggtcccgttcccacgggcagcccgaggctcgaccgaggctcggcatcgacaacatgtcgcgcgcaagacgacggctatcctcttcagaagcctgtcgttcgcaaggcaatcgtcgtcgagggtcatgcttcgtactcggcagcgtcctcgtcgtcgtcttcactcggcggctcttcggacatgaggctcgcgacgagctcccggccacggcgcgcatcctccccctcttcgacggccgccttatcgcctactggccgatcggtaccgtccgcacgcgcgagcgcggccgctgcttggagggcgcgctgttggccgtctgtcccttccagagcggtcgctgcttggcgcaggacctgctgccagtgttgcggcgtctgggcttgcgccgccttggccggttgctctggcgtcgagggctccgtgggccgggcaagattctcttttgtcagggacaccgaagtctcttgatgctctacgtcgtcgtcatcgtcgtcgtcttcaggcttccagccgtcctcgatccagcctgcggcacgcgccattccctcgacaaattggcggatgacggcccgctcgccggcgtacgactggtcgaaccaccaattgagggcgatgcagggctcatgtcgccggccggggccggcaggaggcgcctggacgacatggtggtaccacatggccgggaggtagagcgagaagccctccgggacggcgatggtcaacggccgggctaggtgcgtccggtcgtcctccgacgcaggtgaagcagaaggcgccgttgggtcaaagccagtccatggcatcgaatcggttgttgacggggagggcgtgatggtgaggtgcgattctgagccacagggagagctcgtgcgggtccaggttgcatgtggccagagttttgtgccgagcaggacgccctcgatcggcggaaggacagtgaaagtctttgtgccggagacaaccgcgtagacgttctcgtacggatccttgtggaggctcgtccgagaacgtgagctcccgatccaaaggttgacggcgtctggctcttgacctggcgatcagcaggcaatgatgaactcgtcagcgctgagcaaacagaccgtgcccacacgcgcgcgcaccaacgcacccagagcttcgcttgcccacggcagcgttgacggtacgtcagcctggagggaggcatactctggttcgtccccgtatggcgagtagacgttgccgttctgtgactgcaggtaaagcacctcctgggtcggatccgaggccctctcgggttcggtcgactctgcgcgacgacgagcgcgaaggtcagccgctgcagacacaacgaaaatctgatggggggcagaccttcaaggcgtcggagaaagtcgcgcagcggcatctcttcgttaagtggctcgacaaagtacgtcctggtcgttccatcctccgccgagagctcacgaagcgcgtcagcgttcctgcacaaaaagacgtcaagtcgccagtcagcctctgtcaacactcgaatgttcgaaggggaaggtcgcgcacccatcaggggtgaccgagacgctgatcggccgatcgcccatcgtgttggcgagatactcggtcgtccaccggctcgagctgggcacgtcggcgcctgtcaggaagacgaccggccgcgagagagcgaccatctggctgaactcgagcgccgtcggcggacggtcgagcgcggtgatctgggtgccattcatgtctgtgaagagcgccttccgtcagcgtgcgtccgacatgagagagcggcagcagctggactgcgaactgagcgacgcaccctgatagtcgcgcacaaggcgtaggagctgcgcctcgatctgggcttggttcatggcaggctgagagatgaggcttctgggcggctcgcgtcagcctgcatttcaactcttacaccagtagacgaagctggcgcaccttgaggcacgaggatgaacagcgagcggaggaggtcggtcgtcgtcgtcgtcgtcggagggcacaccgcccgcccgccgaccctgcagaaacctagggttatcgccgctgacgttgcatccgcctccgaccattgactctctcaggaaactttcctctgcgatgccaaggtgtgacacgatcctagccgacagactgatggggaaggtcctggacgctcagccagatgcttgctctgtcgcgcgagctgactgccagcgggacgcgtgacgatggcccgcggcgccgcgcagccgagagctgctcgagcccgacggctgaagatcgaaggcattcaagcaacgctcaccctcgcttgcctctccctccccttcaacgcacccatcagtcatgaccaacgctccttggctctcaatcctgcaggacatagtggcaaagcacaagaaggagacgagtacgtcgcctcgcagctagcctgcccggcccgcccgcatccgggagcctaacgatccctcggccgccttctgcccatcgcgcccgtcgtgctgccagccttctcgctcgccacgctctcgtcgttgacgccgccggccgtctcgaaccggtcgctcattttccgatcgttcgtcgacggctcggcatcgctcgtcgcgacgaccgacatccgctcgccgaaggttcgcgagctgcgcgaaatctcggaccaggcctcgatctgctggtggcacccaacgcccaacacccagttccggatcaagggcgccgtccgcgtcatcggccctgatgaggccggctgggacgagaagcgcaaggagacatgggacaagatgagcggtcacctgcgagcgacgtttgcccggccaaacgcgccgggctcgccgatggaccgctacgaacagggcgaggagtgggaggagacgatcccggcctcggaggatgtgcgcctgcttcattgaagctctcccctttcggtcagctcttgagtgctgacgaccgcacgcgggctgcccctcgccaggacgctaagacggacgcgcagaaggaggccatcaggctcgcaagatccaactttgcgctcgtacgtttaagcatgccttttcagtcgtcaaatccttctctaattctgcctctgccgccctgcgtctagctcgtcattgaccccgtctttgtcgactatgtcgagctcgccgtcgttccgaaccggcacacggcctggcgcctccaggacaacgaatggaaggagcagatcatggtgccctagccaagtcctcgccgtcacttgcttcgaagaagcagaggatcagatggcggctgcctgtcttcactcgccgggccgtagaaggctgcgcagcgggagttgcctggatggccggtcttgccggcgagccatgacttagcgacaggcgacggacgtgctcgactatatgaagcgcactgctctgtcctgcttctccgtgtaagccgggtcgtaagccgaacgaatgcagccgagacgacgtacgtgagcgaccgaccgacgggcgcgaggcacgaaccggcagcgacgagcgcctgacgacgaccaggatcaggacctgtctgcccgtctgcctgctactccccgcatcgcaacattgccgccagctcgcccgtcggcccggcagctagcgaacgccctccggcagcccttcacgatccagcgcctgacggacgcaggccgtcgccgacgccggacgtcgccctcgctcgccaccagctggccgctctcggccacggacctccttccggcgactcgtctgctcgccatcatccagctcctctccatcgagcccacgcgacactcgtcggctacggtcctccccctcggtgagatcgccagattgcactttcacctgaacgaggttgtggaggctgccgagccggccgctgacctctcgacgcgtctcgtgccgctccgtctgccagctctctcgctccccctctcgcacccgaaggtcgagtccctcgcctcatcagcaagctgccgtctgcgccttgatgccgcgggacgattcacctgaacctccctcaagcctcttcggtcgtctcggcgccgccgttactttggccgcgagctcggtcgccggtcacctcacccggccgacccacggagggccagaccgttcgtcgccgaccggaaacgcttacaagtcctcgcttctcgatccgatcccgtctcgcgcgatggcgcacgacagcagaaccccttccttgtacctgcccacgcccaagccgcaccactttggcacgtcgcagccgccgccgccgctgtcgacgagccggcatgggcaccggtacggcggagacagccggcccccgaccaactccagcaagggcgagggtcgaggttccagcaacgattatggttggagtgcgaacgccggtggctttcacggccaggctggccaccgtgccgcttcctcgttgccccggccggacgaacccttcttgtctgtctacgacgttcccatgaagtctgccttcgctagcgccgaccaggcggcacgcatcattgaaaccgctgatcgagggtaagctactatgcccggacgcgctcttacgggctcggcctgaccttcttccctgcttttgccgccacagtagtccgtcctgtcacactcgttccggcgtccacgatcgctgcgactgcgacgagtccgtgcccgagatcgagtgcaccggcttgaccagtccggcacctgttccgccgccgacctcgtcgcaccgtccatccctccagacgagcgggtcatcgtcgtccgcccagacgcagcaagactgggccggaccttctcagcggatacacgtcccgaacggcggccgacacggcggagcctcggcccaaaggggcttcagttcgtcaagtgacccgtacgttacgaccgacccgtacgcttcgcagaagtaccagcaccagcccctcaagggcaccaagcaatcggtcggcacgaggcagctgaaggcggccgacgctgcggagaggagagcggccaaagacgtcgatccgagtgcggagggtctgcgagcagccatggaggccacgcatcagcgcgaaatggagcggtacaagaaggacaaggtaaatcctttgcccttccgccccgcgtctggcaaaagctagggaccgacccgtgagctccatccaacagcagcagaaaaactcgagccctttcatgccgggcaggaacacaatcaaggcgccgtcgagcgccgtccagacgccgccgccaggtcaagtcgcgggctcacacaaacagagctctcacttgcggccggacgccccgccctcgtgcagtcgcgacggcggctcgcaccaccgtcctctcacgattcggtcccctgtacagcagttcatcccgacgccgacccgaccttcggtcaagcccggccctcccggtgattctcgccagttcgccctcgagggcgattcagctctcggccggccggccaagggccttcaaaatggcgaccctttccccttgaagaagacgtcgccccattttcgacagggaaagcctccgccaggacttccggacttcaagaagaagacaccgatggcgctgccagtcccggccgctagcaaggacgcggtcatcgctctcaagcgccggcgggcctcgaacgagcagcagcagccggtcgtcctcgacgacactgatgaagaggatggcgtcccaatcgcgtcgcagcgaaccgaggacatcggcgagtttgacgacgaggacgatgttgccacgtcgagccggcccccgccagccgccgcctcgaaaccggcgccgacggtcaggaactcggccaagaatctcctcgacgcccggccaccagtggatctcaacccgctcccgatggcgccgcaggcgcagcggccaatattcgcgcgcgacgatggtccgccggtgcccatcatcgtcccaaaggagggcacggtacgcaagaagggcatcgtcggcggcatgggcagctccaaggtacttccggagggccctatctgccgtcgttccttcgcttttcggccgggcccacgccgacgctgacgcttactcctttatgcagggtggcctgattcagacctcgctaccgacggcgatgacgcgaggccagagatcgcagctcgcgggtgggacgacgctcattttgcccaagtgcaaggtctactgcgacggcgtgccggcccggcagtgcatcctctcaatccaggccgagaagctggtcgtcgagagtgccgcgcacgtcgacatcatctcgatcccgcttcaccacgtcaaggcgctgcaggtacgcgctgcttcagtcttgcatccagccaggcgaccgctgacggccagcgtgacttcgctcccccgcccccggcagtactcggaacccaacggcacgccgtacgtggtcttgcgagctcaactcgacctcgtaggtctgccttcagccctcggtgcgtcccgtcccgaaccccttcgccttgtctcgcgcctttcaactgaccgacttgaacgatcgccctgcagaaccgttccaggtgacgacctttgtctggaagtttccgcacgaggacgccaaggggctcgacgccgcctggacaaagatgaccaagctgccgcagctcacgggcggccagtctgggccctctttgtcgctgaagctgttaaggtgcgtgccccgcgttggtgatgcatctggtcgaccgctgacgacttcttttcgctggtcattctccagcaaggcgaccacgaccaagctcttgggcactctggaagcgccggcgtcgggctcaaagaaggcgccgccctctctctccgcaccggtagcgaccaggtgcgtcggcgcccgtaccttcgtcgcctgatcggtcgtggaagctgagcgactcgcgccttcctcttgcagagccgtcgccaaccagggtccgatcgcgatcgacgactcggatgaggaggacggcgaggtcaacttccccgacctgaagccgacgctcgcctcagcgccgcgctctgtcgtcacacgcggcaagcaacgcgaggcgggaccgtctgctaaagccggcccgccacgggagccaccgccggccaatccgcatgagctgtgcgtccgcccggtttgccggtcctttcgcttgacgctgacaactcgccacaccttcgcgcagaatgtgcaactggcccgcgaccggccggcctgagatcagcatccttaagggcgactaccaccggacgacgcacaaggacgagtacctcaacgacacaatcatcgactggggcctcaagtgggtttgctttgtctggctgcctccctcccccgagcgccgatcggctgacgtcgctccgtcggaccctgtcttgctaacaggagctcgttcgcccgcgagaagcttaccaggccgaacctcgaggacgacgtctacatcttcagctccttcctctacttcaagctgaccgagccaaagtgcgtccgctcctcgctcagctccgcctccggttgatgacttgctgacgaacgccccttcctgcctgcagcgtcctcaagtcgaagaaggacccgtgggagagcgtccgatcgtggacgaccaagaaggttgagggcaagaaggagaaggagcttaagattgacctcttcaagaagaagtacatcatcgtcccgatcaacgagtcgtacgtgactttcactttgctgaggctcgttctggagcccgcgactgatgccgaccgactctcgcgcgaacacagctaccactggtacctcgccatcatcgtcaacccggctgccgtcctacaacctccgccgcccaagccctcaccgacgcgcaagccgctgctaccgtcgatggcgacgacgacccgcgcagcagcagccccggcaaccgaggaaccgatggacgtcgacagcgagccagagtttgccagacgtccgccggcatcgagggccgactctgagctgctcatcgtcgagtcacgcccaacgaccccgccgcagaagacaacggaggatctgcttgaagtgacggccgacagaatcgtcgacgacgctccgaccggctcaggccagactggcaacgttgccgaggcagcagctgcggacgacgtcgagacgccgccgaccctcgacgaggtcggcgaggacgaaacacccgagcgcaagcagttggtcccaccggccctggagagctcatgacaaagggacgcttgctgacgagcttcttctcctccatagcggctacattttcatcctcgactcgctcggcaacgcgaccgtcaagccggcaggcgtcctgagcaagtacctccgctcagagggcatcgctcaccagggctggcaggccgatgccgagtcgacgatccttacggctgacaaggtcgatgtgcgtcctcgtcctcctctgacgttcagcgcccggtcgcaagagctgtgacggctgacccttgctctcgcaactctttgcaggtcccgcgccaaggcgacgagagcagctgcggcgtctacctcctccattacgccgaggtcttcctgcgcgacccggagaaggctgtcgacttcatgctggtgcgattgtcacccttgccgcccgaccgtctcgcaggatcggttcgctaaatgctctgctcttgccgccgcttctccctctagcacacccgcaagccgaagcgaggtccgggcggctcggcgcagcacaaggagctgctcagtcagtacgaggcccagcgcaacgccttctggacagcttccgaactcgagggcaagcgcgagggctaccggctggcgctgctcgccctcgagacagagtacgtcgagaacgagcgcgccaaggccgcgcagcgcgatccgtcggccgaggcaaaaagcaagagcccagactcgagcccggtcgagcaggcgtcggccgccggaaccgagtcatcagagcctcccgttccagacgtaccaccgaccgcaaggccctcaccgccgccgcaatcgccgccgaccgacgtccaagagcctgctgtcgagctcgtcgacgatgcagccaaccggccggcttcgcacttcttttcgccggcgacgccgcctggcaaggagatggcatcccgctccccctcacccgcacccgaggtcggctcacccgtcgaaactgagccactcgacttgaccacgctccgaggctcgctcccggctcggccggctacaggcagccccgggacggccggcgactcgcgtgagctagcatcgcatgtctcggcgacgcccgaggacgacgcgcaggcgtccaacccggctcagactgccgacgttgaggaggccgtcgacttccagactggccagcatgcgccggtcgcagcccagccctcagaggagaaggtcgcacgccagacgcaagcgacgccgtactcctcttccagctctgtccccggcgtcctgtcggtctctcgccaaccctcgctgccagtcgaggtccacgactcgagcgatgacgagccagaggccgctggcacaagccgccgtcgccctgagaccgactcggacgatatgaatctcttcaagaacgacgacgacgacggcgacatccggcaggccttgggtaaacgcagagcctcctcgccagcctcgtccgggtcaagcggccgccggcagaccaagcgtctcaaggcgacggccccgagcggccctcaaccggtccttcgcttctctgcgccgggccggcacggcagcagcccgccgcccagctcgcagccggcgaacaagaaggcccgctacacggtcaagatccacggccagccttccgtcgactctcacagccggccacccaagctcaaggacggcggccagccgcgcaaagcggcctatccgacctcgacgacctccccgacggtgattgacgtgtctgacgacgactcggacgactcgtccgttcatgccaccgagaagccggcccggcggctgtcgaccgaaatctagagctgcccgagccctctcgcaggcgcaacgtctttcgtctcactcgaccaccccctcctccctcttcacgacctgcgacgccccccatcacgacctctcttgcgctgcccggccaggcgcctcggccgagacgacgcctgcgttcacgaccagacctcgacgcgccggccggcttcagcttccttttacgatctcatgcaacgagcgctttcttcttgaacgagtgagctgagaaagcgaccggcttgccccttgaaacgcgaagggctgagcaaggagaacaagggctggtggggggcaaaaggtctcccctctctcctttgctccctcacaccatcctcgaccccgactgtcagctcaagccaaagccctgaccgtcaaaatccctcttgcatccctctcgtcgccactttgccttccccgcaaccccccccagatgggcgtgtgtgtgaggaaggagaggggggggaggtatagccgtcgctcgacgtgcgcgagcgttggccgggaggggtgcgaggggaccgagggtccggcgtctacttcttctcggtgacgacggcggagccgttcttgccgttgcggacaaccttgctgtcctttccgccccgggccgaggccttcttgtacgtgctccggaagaagctgtggcgtgcgtgcgggcgggggcgagaaacgcggtcagccgtctggagcaccgagcagagcaggggtcggtacaaggggacagagtgcaaggacagacccgatgaagaggaagaggtaggacgagatgagaaggcagccgaagatggcggccgactcggcgccggcgcagtcgccgacctgggggagcgtgaacggcatgtaggccgaggcaaagtgggcgtagcctgtgtaagagttaagttggggagccgcggttagacttcgaagagcgaaggcaggagaggagggtggagggagttgagggggggggggagtcgtgcgcgcggtccctccctgtccttggtccttcctctcccctgccctcaacaggccgccagcggcatgcggatgcccgctgccaaccacatcccccggcgtccgccagccaacaaggacgtgagagctccggaccaggccgagctctgccccatcccacgccgccctctcgaccacccctctcaggacaggagacccgcgcacgccaaagccagccggaccaagggacgcaagggaggggaaggagagaggagcgagccgaaagacggacgatggaggagaagcaacgtgcttgcgtagtagatgatgcacaggtcgatgacaaactgcgtgatctggagcgtcgtcaggtgcttcttccactgtcgttgtcgggcggggcagcgggcggggtcagcggcagatcccaacagactcgcgcgggctagacgtacccagagcttcttgccgcccgccgtcgcaaagtagtagtagtacatgatgacgtggacgaggaggttgatggtgatgacgacccattggaccgacgtctccccctcgagctgcgtaaagcacaagacggccgtcgcagagtggtggaagacgtgcaggaaggctgaaacgcgagtaggaggcaaagtgtcagggcgaggcgctcttcgccttgtagcgtgagtggaaggggagagcacataccgagcggcttcttcttgaggacgaggaagacggtgtcgagcagctcgtagtacttgatgaagtagttgatgatgtagaacgtctggaggcgctgttgaacgaggaaaagggaccgccgggcagggacaagcatgcagagcgggggatgaaagggagcaagaggggcggcagggagaggtgatcagcgagagcgaacgaggttgccgcgccggtccccgggctcgtagagaggccgatgccgccgtcaaaaggccccgacagcggcggctgggcggaggcgccatgcaggcaaggcgggcccgcgcaaagaagagggcaaacgcacgctggtgaaggcgcccgagtcgcagatcgagtagtgcgggcccttcttgccgacgatgggcagactgaacaggcagagaaagaacgttttgagctcgctggtcgagcgtcgaggcaaacaagagagctgcagcccggcggcacgcgccgggcgtttcgcgacgcgccggcgcgcgcgcgcgcgctcggacgaaagtcaaagggggaggaaggacgaaggagagcagacgcacagctcctcgaccatgcaggcgagcaggacggccgagccgaccgaaaggaagaggttgtgggcctggaagaggaactggagcttgaaggccggcagcttgctgctctcgtcggaggagaagagagcccggtcagctcgtaaaaaaagggcggtctagacgagctgctcgagctcgaccggccaggtgagagggtcggcggactgaccgcatgacctcgcggcccgagaagatgacgaggaagtaagtggccatggcgatcgcgacctccttccaggtcgagaggggcgtgaccccgggctgccaggtcgtcaggtaggccggcggatggagcgcccgggggacggttgaggtgatgagctcgtagagcatcttgggcgggaggagggagaaggaaggaagaaggagaagggaggaggacaagggacgacgaccggaagagcgaatggagggagggcaagaagggagagagggaggtttcgagagcgaaggcggcgaggggccgagttacacggctgttacgcctgtggccgttaggcgtaacttcctccctctcctcttgccctctctgccaaaaagtcggagccttcgtctggctggcctctgtcgcactcgagcacccccaaggtgagcagagccgcacgagcgcagacaggccagcagttaaggtgctgacactgcctgcctgcccgcccgcccgcagcctccctcttctcctctctccctgcccagctcggccagcctccacaccccccgcctcgcaccccgttcagagttgatgctcagacgtctctttgcaggcacacgagcacttccttctcagtccaccacaccgtccgccgctcgtctcttcaccggctcatccgctgcccaagcgaccacatcgtcgtcgtcgtccttcgccgccgccgccgccgcctcctctccgcccgcaaccgtcctctcaggcggtcgcctccgcgtcagccgcagcagcccgagcgagaccgtgtgcatgccaccagccgcagccagctcctccagccttctcaaccgcatagatctctcttgtgcgtctgccgtcttgcagctgctgggaggaggcctcgccggccaccggcagcgctgccttcttgctctctcggctcgatgacgactgaccttccgacccgcacctcgatcggttcgttcgcagcgtccgctcgcactccctcctcttcctacgcgactagcaaccgcgagtcgtacgctctccggtccgttcgctccccctcgccgccgcgcagccgcccccgcgagcccgagccgtccttgtacgcgtctgccaactacagctaccagccgcagcagcagccgtcctacggccgcccgacccccttcgcctcctcctcgagcagctaccccgcgccgtctttgacccgcaagcgctcgcacgacgcccgccgctcgccctcgcctcagccttacaagcgccaccagccgatcggccagtcgcacggcccgtcctcctcctcgcagtactcggccccttccctccttccgcagcagcagccgccctaccagcagcagcagacccgcggctacgccacccagacctcctcttcttcgatggctccttcccgccgctctggcggtcgctcagccccgcgctcggccgccggccccggccggtccgccgcgtcgctcccgacgctccctggcccgctcctgacggcggccgagatcgagggccagttccatgcccagctcaagcctcagtggcgggctgagcccaaaggcccgctctcaaactaccacctgatgaccggccagggccagaccgggctcgggacgaacggcgacaagtttacgtttgaggaggccaacgtcgacggccggcgcgtcttccgctgctcggtcacggccgatccgggcatgaacatcgtcggcaccggcgacgacgcaaacaagcgcgaggccgagaagctcgcctgcttgagcgcgatcctccagctcgcccagcgcggtcttgtgcgtgcctgcaacccggctttcactcactaactgctcccgactgaccagcgtcccattcccacgtcctcctcgtcgcagctcgaggctcgcggcgcccggcctgttccgtttggctcagcgccgtcgcagatgcagcagcgcgggatggcgacggcggcctcgtcggccaagtcgtcgcggccgggctcggccctcggcgccaacgagcctgtcatcagcctctcgcagggcgaagtcatcaactatgcccgcgcccggcagtttatggagttctactgtcaaaagtttggcttcgggacgccgcacatcgagtaccagcagacggcgtcggcctcggccggcggttacggccgcaagaagcgcggcggcggcgggagcgactggcaggccgagatgcacgtcgccggccggcggatcggtgtcggctcggcgacgagcaagaaggactcgctccaaaagtgctacctcgacgtcgcccagtacctcgaggtctcggacccggccctctgggtcgactttaagatgaagaacccgttcacgaacgaggccggcggcgcaaagacggcccacgtcctgtttgggatcaacagcgatctcgaggacgacatccgcgaccttagcaaaaacatccgcgactcggagatctggtcaaagtcggagcgcgcgcgccagacgagctcgcccgagctcgcgccggcgctcctcgcgatcccggccgtcaacccggagatgctcgcccaaaagtcggcccggctcaaggcccagctcgagagctacgaggcctcaccaaagccggtcgtcgccgcccttcgcaagcagcggtccgagctgccggtgacgaccaaggcggccgacgtgctcgccaagattcagcttaattggacgaccgtcgtcatggccgcgaccggctcgggcaagacgacccagattccccagctgatcctcgacgactacatccgccgcgacgagggcgccctctgcaacattgtctgcacccagcctcggcggattgccgccatgtcggtcgcccagcgcgtcgcggccgagcgcgaccagcggatcggcgaaaacgtcggttaccaggtccggttcgacagcaagctcccggccccgcacggctccatcaccttctgcacgaccggcatcttcctcaagcggctccagtcggccctgagcgaaaagggcggccagtcggagcgctggctcgacgaaatctcgcacattatcgtcgacgaggcccacgagcgcgacatcgacgtcgacctcttgctcgtcgtcctccagcagctcatccgcgaccgcaaggctaagaagcagccgctcaaggtcatcctcatgtcggccacgatcgacccgaccctcttccagaagtactttgccgacgagacgacgggccggctcgcgcccgtcgccgaggtccccggccggtctttcccggtcgagaagcacttcctcgactcgctcgtcccgcgcctgcgcgagacgacgcccaacaacgccggcggctgggtctttggcgacaaggacgtcgcaaagtacctcgaccaggagctctacctcgcccgcggtggccagctgccgtcgaccgacacgctcaagacgccgtttgcgctcattggtctcctcatctcggacatcattcagaacaccgacgacgggcacattgtccgtgctgcccaagctggcccccttcttgagccgttgtgctgacgccctctttctccctctccagctcgtcttcctcgacggcatccagggtatccgcgatgtccagggcgtcctcgagggccgggcgccgctcggcgtcgacttcaactcgccccggacgccgatccacatcctccactcgtcaatcccggtcgccgaccagcaggctgtctttgagcccaaggtccccggcgagcggcgtatcatcctcgcgaccaacattgccgagacgtcgatcacgatccccgacgtcgtctacgtcgtcgactcggttcgcgtcaaggagaagcgctacgactcgtccaagcacctctcgtcgctcgtctcggcctgggtcggccagtcgaacctgaaccagcgcgccggtcgcgccggtcgtcaccgcgagggtgtctactacggcgtcatttcgcgcgcccggctcgccgccctcgacccgtacgcgctcgtcgagatgaagcggtccgatctgtcgaacgtcatcatgcacattaaagtgagtgttcatgaacaagcacggatgacgacggctcgccattgactgatcccgccaatctccttctctctctctctaggcgctcaactttgctggcatggacgtcaaggacgttcttggtagctgcatcgagccgccctcgcgccaggctgtcgagaatgcgatccagcgcctgcgccagattggcgcgtttgatgacaacgagaagctcacgtcgctcggccgcgtcctccaggagctgccggtcgacgttcagattgccaagctcgtcctttacggcgccttctaccgctgcctcgactcggccctgacgctcgccgccatcattggcgaccaggagccgtttgtcgccccgatggacaagaaggcccgggctgacgaggtcaaggacagctggtcgccgccgggcttccggtccgacctgctcgccgccgtcagcgcctacaacttctggtacacgctccagagccagcggcggcatgccgaggccaacaacttcctgagcgaaaacttcattaagaaggccaactttgtcaacgtccagaaggtcaaggagcagatttggtactcgctcctcgacacgggcgtcatcgacatctgcgccggcgggctcaaggtccccaagggccagcaccaggcccacctccgggcctacgccaacatgccggccgagctcaacaccaactcggacagcctgccgctgctcgcggcgctgattgcgacctcgtcggcgcccaactttgcgatccgcatggatcagaaggcctaccggacgtcgcaggacaaggtgagccctcctcgaacgtgtcgtccttccttgctgctcgtcactgacaagcctctctctcgcagaaatgctcgatccatccgtcgtcggtcaacatgcaccggcgcgagaacctcgcggccgagagctcgaccatcattggcgagaaggcgctcatggcgttcgtcgagaaggtggccgtcggctcgaacgccgacagcaaccagccagcccagctgcgcaacacgacccggctcgacccgatgacgtatctcctctttggcgcctaccacctccggtcgacgccgaacggcctcctctgcgacgactggctgccgatcgtcggcaacatgggcgcactcgacgaggtccagcggctgaagaacctgctcgacggctgcatgcttcgcatcttccagggcgtcggcgccgcgctcgccaagcagcggagcgaccggctcaccaagcgcggcaatcaggcggccgccgtccggcgccagcagatcaaaacggtcggcgagaacagcgacaacgacgacgacgaggccgagcacgaggccggcgtcgagctcgaggagacgccagtcgacctgacgctgacgacgaccgaggtcattgagctcgacaacctcgcgtcggacgtcgtcgccatcctcgaccgctacgccgaggaccggggcgcgaccgcctcgcgcgcgccgacccggccgggctcgccccagcaccacccgatgacggcgcccttgcagaagacgcagggtggctacgtcccgcccgccgctcgcatggccggcggaggccagccgctcaacccgggtcgtggcctcggcaacatgggttcttccggcggctaccggcggcccttctagcccccttttctcactcactctagattttcccaccctcccttaaaaggtcacgttcagctttccctttccagcagggcctccagatgtgaatgtcgcccttcccaatagtgcgctgttgtcgcgcagctcgggtcagtacgagcgagagcgcggcacgcggcgtgcgtacgggggcggctctctctactcattgaacgggctacggcagggggcttgagtgaaacagagcgttctctgagccgaatgtggaatgccatccgggttgctgcctccctctgacctgcgaaggtcgccgtgagcccgtttgccttgttggtgagggccggctcgtgcgctaccttgacagtttcagcgcccacagacggcccagacggccgggcttggtccccgatcgatcgccccagaatttggccgcgggccgccccgcgcgcgcagaggcccctcccgcgcggcgcgcgcgcgcaggcgccggccgtggccgcgtctcgcctcgtccgagcctctccgccttgcttctgacctcgtcctcaagccactcaacaagatgtacgtctccgagcctctcctagaggttcggtcacggttgtagccgctcggatcaaggtcgctctgtcatcccttggagcggcgctggtccgagcgcgccctacgaccgaggggaccggacatgcttgcgctgtcgactcgctgcccgcactgaccccgctgctcgccttgctttctcgcaggggagcctacaagtacgttgccgagctctacaagaagaagcagtccgatgtcatgaggttcctcatgcgcgtccggtacgtacgacctttcttctcattgtcgctgctgtctggccagctgcttgcgcaggcgcacggtgcgagctgctcgtctgccggctggcagctgtcgcgttcgctcaacgattcgaccgggcgctgatcacctctgctccctcctactgcctcctcgcgcatcgcctgctgctgttgctgttgctcgtgccgccctttaggtgctgggagtaccggcagctcgccgtctgccaccgtgcctcgcgcccgtcgcggcctgacaaggcccgccggctggggtacaaggccaagcagggctacctcatctaccgcatccgggtccgccgcggtaaccgcaaaaagcccgtcaagaaggggtacgtccggcgttcagctctggtggttcagggaggcaggctggcagggaggagcagcgcgggcagatctgcgggtcacctgccaccgccctccaggccggccaaactccagattctcagccgcgacgctgatatgacgccttggtccactccagtgcgaccttcggtaagcccgtccggcacggtgtcaaccacctgaagttccagaagggactccgggccactgccgaggagcgtgtcggccgccgctgcggcaacctccgcgtcctcaactcgtactggatcaaccaggacggtgtctacaagtactacgaggtcatccttgtcgacccctcgcacaaggccgtccgccgtgacgcccgcatcaactggattgccaaccccgtccacaagcaccgcgagtcgcgcggccttacgtcgatcggcaagcagaaccgcggcgtgcgtccagactgttttttgttggaatcgaagcaggagcgcgagggcaggggacgaggtggggggcatcggcggcggtcgacggtactcgcgcggaggtttcacacgctcgacgcggcatgcccgtcgagcagatcgagctctcagtcaggcagcagccgctcgccgcttcgtctcgtccagcacccctcgtctctcgctcgactgcaacctgtcgtcacttgcttgccgcgactgcgccgctgacgccgtctctcctgttcttcttgcctcacagctcggcaagggtcatcgcttcaacaagagcgagtggcgcaagacctggaagaagcacaacactctttcggttcgccgctaccggtaaacgtagcctcctgtggggttgcgtcctgtcgctcgttggcagcgctctaccgatcggggccgtctggacctcttgggatgcgcctactcgatctcaatgtctcttcgttccaaacacgcgcgcgctcgggagggttgccctggtgaattaggggcgaggagagctgctgacttcggtgccgaatgcgttcgatatgaccgatgccgtccttcgctgacgctgggtgttatgtgatgcgctgaacagctcatgctaacgagcaggttgacgtgggttcacgagctgtgccaccgaatcggctggccgtctctcgcatcgaaaggttcgacacagccggcgactgctctcgccgagctctacttcagggagagactgccgggaagaggaagagtcagcgcgggagccgttggccgacgcggggtgagctgcgccggtttcgcaagcccagttgggttttatcagcgccctgtcggccagcgatggttcaggtcagattctggtgcacgaacagccattccagactacctcatgcgcccctcatgagaaagttgggatcgagggcaagtggagtgagtcgaatgagtcgtcgtcgcccgccgacggacgagtccgcgcagacgcccccgcccgagcatgctctgcctcaaccgtcgaccatctcttccgtcatcgttgtctcgctacctcccagcttcggcctcgatgacgctcaagcaagcgccagctccagcgtccgaccagccgtcggtctcgcagttcttcaagcggaagacgccgccgcctcggtcgtcgtcgacgtcgccgcacgccgccaacgctgcgagctccttgacctcggccaagcgtgtcaaggtcgagcacgcgccggctggatcgccatcggacaagcgcaaggggcgggccgaagtcatagtgctcgactcagacggcagcggcgaatcggtcgcctggcagatggcagccgatgagagtgacgacgaggttcagatgatctcggcctctgtcgccaccgccaggtcaaagccgccggccttcaccgtcgtggcacgtccaggcctgacagcttccacgcctccatctggcgaggcgcggactcagcagcagcagctcgcttccgggagtcggaccgtccagtcgtctgtcacaagcacaagtggctcggccagatcggccgcccctgtcgcgcccatctttcagcaggcgcagcaggccgcccaagcccgtccgtctgcggccagcgctgcgtcgaaacggcctgccttcaacgcgaaagagtcggccgccgcccaagcattacgagtgctctcgtacgtcgagccggtctctgatctggacgatgtcgatgcgtcgggcgccgggccatcaacgaccgtctctcaggcgccgccagtctcggccgagtccgcagccgcaaaggccaagcggcacgaacagttcgctgccaagctgctcggtcggcgcttcggccggcgtcggtcgctcgatctcgacgaggcagaggcgcgggcagggcatggctctgacgacgacgcggcggccggcggatcaagtgacgcggacgccagggagcgcgtcgacgacgagagcgccgacgacagtacctctcttgagcgtccgaacgccaagctcagcgcgctcaagtcgacgctgacggcaccggtcaagaagaaggagaccggagggaagaagaaggcctcgcccgaggtcgggcccagcggtcagacgtacacgccgctcgaggagcaggtgcgtgcaaagcctcctacttgcgtcgacctcccgactgacgcctcactcgactcctcgtgacaggtgaaggcgctcaaagctgcaaatcctggcgtcctgctcatctttgaaggtaggtcgcggcgaggagtgcccctttccctgcctctcttgctgacggcggcggcgtcgaccgacccttctcctggccagtcggctacaagttccgcttcttcggccaggacgccaagacggcggccaagatcctcaacattgtcgccttccccgaccgcaacttctacacggcgagcatccccgtccaccggctcttcatccgtgcgcgaccatctctacggccccgtccgccgaagcctgacttttgcccctggccctgcaccacagacattcgcaacttgatcgccaacagccacaaggtcggcgtcgtccggcagatcgagacggccgcgctcaagaaggtcggaataaaccgaagcgcgcccttcacgcgcaagctgaccgagctctacacagcctcgacgtcggtcgcttgaccttctgcccaactaattcgagccgctcgctgaccctgatgtttcctacggacagctgggtcgacgagcttgcgtcagctgatgacggtgcgccgggtaactcgctcgccgccgtgccgcctagcaacgcgctcgtcgcgatcgtcgagaagcccgtcggccgcggcaagggcaaggcgcgggcgaccgacggctcagatgacgaggtgcggatcggcctcgtgagtgtcattccggcgaccggcgactgcacgtgggacgagttcacaggtgagtctgcgttccaaggcaacccgttaatctacgagtgcctgaccttttcctcaccctcagatggaccggcgaggacggaactcgaagtaagtgcacgtcttcagctggaggagtcgccccgcaaagctgacacaatcttacccttctcagacccgcattactcacatccagccgcaagaggtcttactgccgctcagcaagctgtcgcacgcatccgaaaagcttctcgagcagctgctatcgcccgggtgcgtcgtgctgaatggactgagctgggagctttcgcaggctaacccgcaatctcctccctcaaggagcacgagcatccgcttcgagcgcgtcccattcgatctcgaccaggacgactgcctttcgctcgtcgcgcgcttctggcggaagccgggcgccggtgcaggtcggtcctcgtgctgatcactcgatcactctctccttagcaccggctgactggacaacttctcgccaaacccagctgagaaagtaaagacggtcatcgacttcccggacgctgttgtggccagcctcgcctatgcgatccgctacctcgagggtgcgtcggtcgtcctgacgaagtgtcacactcgcctcctcatttcgtcgtcccttcttttccagacttcaagctcgcgtcatcgctcagtcacacagacaccaccttccggcgcttctcgactcagtcgcacatgctcctcaacgccaacacgctcgccaacctcgagatctaccgtaacgctgacgacggcggcgagaagggcagcctgctctggcttctcgcagtcacgacgaccaagatgggcaagcggcagctgcgcgagtgggtcggccggccgctcgttgacaaggcgtgcgtccttcatgtcgagttgacgaatgcaagcatcaaggtgtaggctgacctaacccctgtcgagcaggaagctcgaggagcggatcgaggccgtcaccgaaatctcgaccgacacgagcgaccgcgtcggcagattcaagaaccttctcaagaatctgccagacctcccgcgcggtctcgttcggatccagtcgggccgcgtaagtccctgcatcgatgctgcggtgaagggggcgggactgccaaagctgacccttgtgccccgtgctcttgatgtcgtgcgcaggcgacgccggctgagctcatttcggtcctcaagcactttgaacgcatctcaaccttctgggaggtcgcgatgacgtttgacttcgcgtcgccgctcctcaacgccatcatcggctctttctcggcgctcgaggagccactcgctcggcaccttgaggccatcgacgagtggaaggcccgtcagaacgacaagccggcgctgtggaaggacaagagcaagtttgcagagattgaggatgcgcgcgacgtcagtacctcgtctgacgctcgggctgatgacctcgccctgtcactgactctcgcctttggcctcccagatgatcatgttttgtgatcacgagctgaccgaggagctcgagcggatccggacgctcatcaagcgaccaaaggcggtctactcgacgatcgcaggcgtcggtgcgtgcgacattattgtgggcaatgctggacctgacgctgacctctgtcggcatctgcgacggcagagaacctgatcgagattcggacctcggacgccaagaaggtgccgcccaaatggatcaaggtctcctcgacaaagaacgcgtcagttgacgtccttcctcggcgctcactcacacatgtgctaaccctgatgactgccttgcctccagcgtacgctttcacacgcctgaggtgctgcggatgtccgtgtcgcccttctgcctgggtctttctccggaggctcgctgagcgtcctcgatcatcccacagcgctcaagagaaggagcagcacaaggagacgctggccgcagaggcagacaaggcgttcgcctcgttcctggccgagatcagcgagagctatgacgtcttccgtacggtcgccaatcaccttgcgacgctcggtgcgcaacgactctctttctcgtctttgcggcgctcgctgaccaaaacttctcatccgcccaacagactgcctgatggcgctcgcgctcaccgccaacatgcccggctacagcaaacccaagctaaccgatgagcaccagctcgtctgcgagggcgcctttcacccaatggtcgccgccctctccaacgacttttacgtgcctgtacgtgatggaccaggccttcaccgacacacctttgtgtcgaggcccgatagcgctgacccttccctcccgtcgacagaacgacgtcactatgagcacgactcacggccggacaaaggtcatcaccgggcccaacatgggcggcaagagctcaatggtcggtccgccttctcgactgctattgttccgcgcaacaactgacagagatgcctctatcaactcgcaggtccgcacgattgcgctcattgtgctgatggcccagatcggcagctacggtccgtctctctggccacccgaagctcatccccacttgctcaccctccgccgtctttctcgcagtgccagcaacgtcggtcgaactcggcgttcatgacgcaatctacacgttcgtcctgtcggccgtgtccgtcgtcgtctacgagctgacctggccatgtgtgcgtgcctccctcagtcggatgggcgcgtcagacgacatcctccatggccgctcaacattcatggtcgagatctcggagacgagcgacatcatgtacgtctgtcgtgcaagtcaaatcagagaccgtcgtcgtgctgatgtgtcctggacgacgctttagtcgccaggccacctcctcgtcgctcgtcatcctcgacgagctcggccgcgggacgtcgacgtacgacggccaagcgctggccgaggtacatccaatccaactcgtttccataagctgcgacatgactgaccctccctcgatggcgctctcctggtccaggccgtcctccaccatctcgtcacgcaggtcggctgcaacacgctcttcatcacccactacccgctcgtcgcgacgtcgctcgctcgacagctgccggacgtcagcaattggcacatgggcttttgtgcgtcgccgttcgctgggagaaggtgtgtgttgcgcattgcactgacgactcatcgcccttgacagcgcagcgcccgcgccttgacggcagccaggagattacgttcctttaccgccttgctgctgtcagtcgcggtgtgcgtctcaacctcagcacgtacgcagttgaccgtgcttcgtctcgcccttcgacagggcctagcaaaggcgtcgttcgggatcgagtgcgcccgcctagccggtatcccagacgacgtcctgacgagtgcgcacgcccactcggccgcgctggagcgcaaggtcgaggccaagacggcggccgtccggtgcgtcgctatctactttcaatggccggtcttgcttgcgactaacatcgcgcgcacctgctctcgacaggacgcggcgcatggccgacatcctccagacggctctcggctgcgacgacagcccagcagaggaccccgagcggctcgtccgtcaggcgcggacgctccttgcggggctgctctgaacgctcttttcgaattacgatgaccccccttttggctcgtgcacgtggggcagcagtcggaactcgtttcccgagctcgttgcacttgagggccggctcgagagctggtgtgcgggtagatgaaacttgaggcgtctttctcagccacctgggctcgtctaagtgcccgatctgcgcccgcggctgccgacctgcgcggccgtcggtttggccggccgcgcaaggcttcagtgaattcgctcggcctatccttctcgctccccaccaccaactcgaaaccgttaccagtttgtgagtctgctttctggctcggcctcccctctttcacagcttgcataggtgcctgctcgcctgcgctcccctctcgtctcggcgaccgggctcggggcgacggcggcgagctgccgtgctttgctgctcatcgctctgtctcaagtggcgatgggcgagctcgacggctcggtggcgagctctgcctcgcttcgcctcggcggtccacgacggccttgcagcctcagctgccttgcatctgcctctcgctacgagaggctttgcgtcgttgtcgttgctgtctagggtaggggcagacttcgttgacgcttcggcgtcgggccaaatttgcccctccgtcgtcgtcacgccagccacctccctttcgcgcctcgctctcctgctgcagccgctgacctcctctcccctcctctctcacttgcagttgaaaatgggaaaggacaagcttcacgttaacgtcgttgtcatcggacacgtcgactccgtgcgtcatcgctctcttgtggtgcctctttcctcgcttgccgactgacccggctctcctcttcccgactacagggcaagtcgaccaccaccggccacatgatctacaagtgcggtggtatcgacaagcggaccatcgagaagttcgagaaggaggccgctgagctcggcaagggctcgttcaagtacgcctgggttctcgacaaactgaaggccgagcgtgagcgtggtatcacgatcgacatcgcgctctggaagttcgagacccccaagtagtgcgtccttcgtcccgccgccctttcgccctgctcggcagtcagctgaccactgacctccctgccttctcgcagcatgatcaccgtcattgacgccccgggccaccgtgacttcatcaagaacatgatcaccggtacctcgcaggccgactgcgccatcctcatcattgctggcggtgtcggcgagttcgaggctggtatctccaaggacggccagactcgggagcacgctcttctcgccttcaccctcggtgtccgccagctcatcgtcgccgtcaacaagatggacacgaccaagtactcgcaggaccgtttcgaggagatcatcaaggagactgctggcttcatcaagaaggtgtacgtcctgcttctgcctcttgttccatccccgctgctcggcagctgaccctttccctcttccctctgcagcggctacaaccccaagactgtcgccttcgtccccatctctggatggcacggagacaacatgattgaggagtcgaccaacatggcttggtacaagggatggaccaaggagaccaagtcgggcgtctcgaagggcaagaccctcctcgaggccattgacgccatcgagccccccgttcgcccctcggaccgccccctccgtcttcccctccaggacgtctacaagatcggcggtatcggcacagttcccgtcggccgtgtcgagaccggtgtcatcaaggctggcatggttgtcaactttgccccctcgaacgtcaccaccgaggtcaagtcggttgagatggtgtgtttttcttgctctctgccttcgtttctcgcaccttttgacctctcccacctctttcacctcttctccagcaccacgagcagctcaccgagggtctccccggagacaacgttggcttcaacatcaagaacgtctcggttaaggacattcgccgtggaaacgtctgctccgactcgaagaacgaccccgccaaggaggccgcctcgttcaacgcccaggtcatcgtcctcaaccaccccggtcagatcggtgccggctactcgcccgtcctcgactgccacacggcccacattgcgtgcaagttcgacacgcttgtcgagaagatcgaccgccgtacgggtaaggtcatggaggcttcgcccaagtttgtcaagtcgggcgacgccgccatcgtcaagctcgtcccgaccaagccgatgtgcgtcgaggcctacaacgagtacccgccgctcggccgtttcgccgtccgtgacatgcgccagactgttgccgttggcatcatcaagactgtcgagaagtccgacggcaaggccggcaaggtgcgtttcggtcgcctgctgtcgtcgtcgcatcaccctgtcgctgaccctgcctgcctgccttccttctctaggtcacgaaggctgccgagaaggctggtgctaaggccaagaagtaaaagggttgccgactctttgtcttttgtctttcatgcctctgttctctacatcttttgtgccctgtcgtcgaaaggctcttggatcagggcagcgcgctttggaagtggtcggccgcgaggtcgagctctgcttcgggcggcggtgcgggcggcgggcggcagacggcggcgacgacgagctcagccggcgggggcatggccctgcatccttctctcccggtccgtcccggtccgtcgtcctcattccttcccagctcttctccaaacagtccttggctctcaacttcaacagctcgaaaagcttgttggctcgtcttgacgctccagcaacagccgcctcggcaggctcacgcactcgtccgccccagcccatctgcctcggccgacgagcttacccgcccgcctcgctggcctttcgggcgacctcgctttgctgacggaccaacacatcttttgaccagccctctcgacctcgggctggctccgtggcgacctgctcctctaccgactgttgtttgctcgctgatcgacctgcaacgagtggaggatgttgctcgagcggcgcccagcgagctgacagacccgtcttcccccgtacccgtaccccacccgccagccgctgcgtcctcgccctcggtcccgtctttctcccttggctcactcaggtgcgtttcctcactgggctcagcggcacggccgtcaagctgaaggcgaagcgtcattggctgcccgaggtaaaagaggcctcgcagggtttgccgtcggcctccaaccaggacaagggatcaactcgtgtgctagcgaggctctgcgaccgctcaaccttctggctagcatcgctcttttacgcaggccggctagctgacgagagctctcattcgacctccttcctgcagctcgcgcccaagccttccgacggttgtctcgagtggcacggccggtttgagggctgccatcgtccacgccatcgctttgccctgacgcttgccgacagtgagcgttagtcccttgctgggcggccacgtcagagtggcgcagagaagccagcgtgggcgagtacctggcccggctcaaaggaacagtcgactcgcttcatgacggccccttttatcctgtcgcagtcgcaccctctttgtctgtctgccgctcggttccactctccaagctttgcccagcccggcgtctgcatcgacggctcggcttgctctcctgcaccgtctctaggcttctacttcaccgtctctggtacttgtccggtagcgctcgcttcagccgccctcttctcttcgcccttcgttttctccacctcttatgagtcgccgttctcttctcacgctggcaggtttgatgtcccaacagagggaatatctcggcttcctcgacgtgcatctctggcagcttgatccagagtatgaggcaatggtgagggcggggtccaagactgccggctgcccccgccggctgagctcgtcgtcgccgccgtctgccgcccgccgcccgcaccgccgcccgaagcagagctcgacctcgcggccgaccacttccaaagcgcgctgccctgatccaagagcctttcgacgacagggcacaaaagatgtagagaacagaggcatgaaagacaaaaagacaaagagtcggcaacccttttacttcttggccttagcaccagccttctcggcagccttcgtgacctagagaaggaaggcaggcaggcagggtcagcgacagggtgatgcgacgacgacagcaggcgaccgaaacgcaccttgccggccttgccgtcggacttctcgacagtcttgatgatgccaacggcaacagtctggcgcatgtcacggacggcgaaacggccgagcggcgggtactcgttgaaggcctcgacgcacttgagcgctgctgcgcccgtcgtctacaagagtcgagggccacggatccggagccagtgttctaacacgagatcagcttgaggcccaatccgcgctcccgctcactggatccacctgcaaccaatatccagacactgatagttgagagctgagcgagtcgtttgcggcaggggaggcgtcaagcgaccgaccgacagtcccggcgcgacctccgctcgcagccgaagctcaaagcgcagacgcgccgaaccgccatcagcttctctccttgacaccctcaaccttaccatagccgcttgaaactggcaagcaagcggagacatcgttctggctacactgcctgctcctctgcgagtcatgtccaagtatgccgacctgcccgacatcgtgaggccgatcactcgctcagagcccgccgctcttcgccgtccactgagcttgctgacggtcgaatcctcctgcaggacacggcgccagacgtctacgagacggaggatgtcccgccggtctctggtcgcagaggcgaggtgcgccagccagccagctcgtcttgttcgaggccgagggcaacaactgctgatcccgacgcgtgcgatcctccgccagctcgacgactcggacgacgatcttcccggcgccggcgccgggccgtccgtccggcgctctggcagcacacctggcctgaacgaggccatcgatgagtcggctttgccggcctttgaccaggctggccgcaagtttggcgcgctcgccacgagtgagccctcgacttgcgccggctgcgggccatcgaagggcctgacgatgctgacgctccctcgcctccctcctcagtgacttatacgctgtacccatcgacgaccccgcgctcagatccgacgctcgcctcggcctcgctgccgtcagacggcgacgcgtacgcctcgccaacggtcgagcacccgcgcgcacggcttcgtcgactccgctacgagatggaggagctcgagcagttcttagccaagacgcctgagcccgtcgatgcgacccagacggcgcctagcgcgaaaaaggaggaggaggcgcataagacggcacgcatgatggaggagctcaagggcttgcagagcggcctgcgcagcctcgacgtcaaggccggccggccgcacgagaagcgcgacggctgggaagcttcgctcaagaagctcgagagcagcatcgcgcgaccgacggcgtctcctggccaggagcaggaagaggctgtgaaaatcaggccggaggcggagcagtctgcgccaagcaaggttgctgacctcgaccagcgtttggcggccctcgagacgatcctcggcacgcatctttctgggccagaagatgtcagtgccctccctttccttcctaaggtgctctgccgctgataaaagcgctgcttctctcctcggcctcagtcgcccgacctggcggcaccgatcctgccgacgctcgccaaaatggaccacctgttgacactgctcacccagccccggcacctcgacgccatctcgcggcggatcaagctcctgctgactgatctcgaccgggcacatgcctcgaccaaatctggcggtggcaagcggcagagcatgggcggcgacggcagcgcagggctcggcctcctcagtcccaacctcccgacgtcggcatcagcggccacgacagccggcgagacgaccctgacggcctcgcaggggcagaagctcgatcaagttttttcgctcgtgccgcgactccagccgctcctgccgctcctgcctcatcttcttgcccggctgcggtcattgtcggatctgcacgagtcggcggccaactttgacgagacgctcaagcgactcgagcagtcgagcgtgcgcctagcgtcggcccaacaagagacgacgaccgtcgtcgaccggctcgatggcagcatccgcggcaacgaggaaatgatcgaggccaacttccgggcgctcggcgggcgggtgggcgacatccggaggcggctggccgcgctcgatggcggtgaggcggcagagagctgagatttatggatgcacacgctcgcggggtcgtaagagtagcagtttcatttttctgtttcacgccgccgtccgctcatgcggcgagcagcgtgtcgagcgtctcgtcgtggagctctttaagaagctcgcgcgtctcacgcgccggtcgggcgacggacgggttgtcgaacaccgagcagcagtcgagcacctgcttgacgaccggctccttaatgtcgagcgcctcgagcgacgccggggcgtcgcttacgagatgaaggaggatttgcgccgtcaggacattcggccgcgaggggaagacgttggacctgcgaagggaggggtcggatggccttcagcgtacgatcggggcaagacgaacggaggctagtctcaagactcactggaggatcgaggcaacgtcattcgggtcgttcaaggcgaggccactgacgacgcgagcgatcgcggcgttgaagggctctgtgtcggcgtcaaaagaagagacgagtcagtcgaccagactacagagtgacgagattctcggaacggtgactgaccgcgaccttgcgagtggtaggcctcgccgaccagctcttcgatcagcgacttggacgccggagacatgttcttggccgcggtgtgggcgacgcaggcaagggcatgaccgagactagccccgatctcggcgtcggacgaacggatggcggtgacgagctcggtgatgagggctgtcgaagggcgtccaaagtcagttttctcggcactggatcgatcgcgaggcgagaactaagggtcgcacggtccacacgagtctgcgagaccatcagcacgccgaggccctcggcagcgtggttacggatcgagagtgacgccgggtccgtgaccgacttgacgaacgtccgctgcagctgcggctggaacggccggacgaggtgcgggacgcgccgcagaaggacggtgagcgtgccgaggctggcgtagtccgagaagcaggccgtcagctaaaggcctcatgtcaggaaggctgagccggcatcaggacgcacatggcgttcttgatcgcaggcgggaaggcctggctactgatgactcggatgaggggaccagtcagttggacgatataaggcttgatgccggcctcggacgtccggaggacgaggtcgccaacaccgagcgcagcctgctcccgctggtcgtgcgtgctgcaattgcgtgcggaatcaagagggatcagcctttgcctcgaccagtcgaggcgaaaacagcaagtcgacgcaccctccgaggacaccggcgaggaggatcggcacgatcgactggacgcccttcggccgcgagaaaccagggacctcgacgccgggagcggcggtcgactcaatcgacgatcgcagcgggatgacgaggttctcgagctcgtccttgggaaccgtcttgaccattgcctcgagcgcgagccaggcagcctcgacaacggtgtcgtctcggtcggcaaacgcagagagaagctgccgggtccagtcgacacggtactccgagaagtcctcctcggtgacctcgcagaaggtttggctgggtgggaggaccgacgagtcagcacgacaggctggccaagcatccagcggcgcaggacgacgtacaagcagccgagtgcgctgacacgccggcggggcgcgtcgctcttggcccaaccgaggagggtcatcatcagcgagttgaggccctcgatgtcctcgatggactggaggaggatgcgcatcgtctgcttgacctcggtcttaatctcgtcatcgtcctcgcccgactcgatcgacttgatgagggcctggaggatcgacgtcagccgcttgctgagcgccgaaccggcgaccgagacaagcgagccgagcgcgcgcgcgttgaaggccgacaacgtgccgccgatgagggcagggaggacgactgggaaaatcgagttggcccgaaccgacatgatctcccggagagcgcggagagccgtctccgactgggcgcccggctggcggagggcctcgagcagggtcgggatggtctggtcgatggccttggtaccgaactcgctctggaggaggacgtcgaaggactgagcggcagcagcgcggaccgaggtgttttcgtcgacgagtgccgtgcggacaccggcgatgatggcgtcctgatgctcctcgagctggagctcagtggcgctgtcgctgcaagagcggaaccgggagaaacggtgtcagcaacggcctggccacaagcgcaacgcggacgggggacgtacaggatctcgctgaaggcgaggcaggcaccgatccgaacgttggcgttgagcgaggtgacactcgactggagcatcgggatcatctcggcgatgatcctctcgccgttcttcttgcagagctcgccgagcgtgcgggaggcagtctgcgagggaagaaagaggtgcgaatcagccgagggcgaccattgctttgactgctgttggaacatacctccttctgctcggcacccgggctcgacaaaagcgtgatgaccatgttgatgaccgaaggaaggatctcgcgcactgcacgagcggcgggagagcaacggtcaagacgtcagcgccaactctcgcggcaaagcgagccagccgggacgtacgggtgcggggcgtgtctggaagagagagagacgaagcgccggcggtcggtcagcgactgcgatacaaaggctagatcgacaagcgagattgaggactcactctggacgagagccttccagatgtggaccgaagcggtccggacggcgccaacagcatcctggcggatgacgtacagggccgagaggaccttgtcgcgcttttccgggccgagggcctcgagcagggccttgcgcgacgagtcgccggccgaggtctcggcaccgtcctcgacctcgatctcggccttgccgctgatgcccgaaatcttaaacagaagttctccggtgagtgagacggacgattgctgcgagccaaacaaaagagacggtcagcacagcgggaggtagccaaggaaggtaaacctcgatgctcgtgcgcacccggatgcgccagcgctcgtcagtcatgccgttgagcagctcgggcaggagcaggtcgacggccttggccgagtagttgccgatgatcatcttaccggcccgcattgaggcgtcgcggactgagtaggggaagggcgagcgagcgaagtaccgtcagcagagcgagttgcgagcagcagagctcgcgctacgtaccgtattccgaatcgtccgcgaggccgccgaggatcggtggaatgatgcggccgaggtgaggcacgaaacggtggccaaaggtcgtcggcaggtagacgaggagcgagatgaatccctcgcggacatagtggcgcgggctgctcgagttgctgatgatctcgggcaggaggccctcgaggcgctccatgccgaggccggagaggacctcactgaggccctgggcggcaccctgagatgagcaagagggacataagcaacgtcagcatctgcgtctctggcgaggcatgcggtcgcacgcacctggcggtcgacacccgacgtgtcgcttttgagcgtgtgcaggaggctctcgacgagctcggggaagcagtcctcgccgagacgttcgacgagcgtgccgagtgccttggccgccgttccacgggcctccgggaccgggtcgacgaggacgacgtggacgagcggcatgaacgtcgttactgaagttcaaatcagaggggacagggccagtgtcagaagcagcaaagaggcgctgcctgggcgagcagcacgcacagtaaggcgtgaagtccttcgggtccgtgagcgaagacaggttgccgagaatttggaccgacttgcgcttgctctgggcgctccgctcgcgcataccacgctcaataatgggggtgacctggagggagggccgaatacgcagcgtcagcactgtcgaggctggcgccgccagggaaaaggcctacacacgagcgcaagcgacggggcgtcgatgaagtgcgagaaggccgtgttgagcaggtgcgtgagcgcggcgttcgtcttgccggtcgggtcgacaagcgccttgaggagcgtcggcacaagtgctttgatctctgggttgtgaatgacgtctccaaagcgcttgagacttgtgttggcagcctgccggacctgcgtgctgagggaggcaaggggaaaacgaggcgaacgtcagtgacaaagtcaacggctcaaacgacaatggcagagacgcactgcgagtcggtcaagacggccgtgagctcgggaatgatggtcggaagcgacgtcgccagctgcttgggagcacagaaggccatcgcgccgagaagctcgatcgagcccttcttggtccgccactgcttctcctcgagaccggcaaggagcgaggggaggatgatgttgacgcagtggccggagagacgcgacatgatgaccttggacgcgtcctggcaggcgtcgcgtacgtcggtcacagtgtcgccgaacgactgcagaagcagcggcaggatgttttcgacatagggctcgaaaacgcgaccgagggtggctgacagcgtcctgtgatcggcgagcgggcgggcagggtcagcgcaacctcttcagacccgggtggcgacagcgacgcactcgaaagcgagcagagcgccctgccggtgcgtgtacgactccttgtcgcgcgcggcggcgtcgagcttgtccatcaggttgaactccttgagtgacgatagaccacggcccttgacgacgccggcgatgccgtaggcggcaccgcggcgctcggcgtacttctcgccgttgacgagcatcgcgtagagccgggcgacgagcggctcaatctccttgcgcatgcgcttgacgagcgcaggaatgcagtcggagacagccgcctggacgacttcggacggcgtcttgagcgcaagcacgagacggtcgacgaccttgggcacccgcggatccgaagcctcgaggaaactggcaatgcggccaaataggatgacgatggcctcagagatgtggtcgccggcctcggtgccggacgacggctcggcgaggtttaactcgaagacgccgatgagctccgacagctgcgtttggccgaggctgtcgataatgatcgcgccggcatcaagcataccgcggcggacggctgggctccggtcgccaagcgcctccgactcgatcaggaacttaaagaaggggacgagtaaatccgaggtgaagctcggcgcgagcgcggagaaggtgtcggcgatcgcaagccggacctgccacgggtcagaccggttgagcgactcttcgcgcaccatgccgtactcgtcaaactcgggagctaggatccgagcctgagtaagtgggttggagatgcagtgaccgggtcagtaagagttgcacatcggggctgggccaaggttgagtcaaaggagcaacggaccttatcggcgtaaagctcttcgagcgcgacactgatctcgccgatgagctctgggtgaagccggatagcctcaccgatggcgacggcgccgctcgtgcggacgtaggcattgtcgtgctcgatgaaaggcaggagcttggcgatgaacgtgtcggggacgtcgagaccgttatcctcccagatgccatgggcgaggcgggcgttctgcgggtcctcgtcgtgaacagcgatccaaatctcgctcgagtagtcgaaatccgtcaggtcgagcggctgaagggcctggagcgaggcgttgcggacgacgacctcctgcgaaagcgtgcccttgagcagcgccgtgatctcgtcgagcgtcgcgttgagcttgatggcctcgccaaggttgatgagggccgaggccgccgacttgcggagcaaaggctgggtgccaatgagcaggacgaggtcggtgatggtagacaggcgcgggaaggacgggtcaccgactacggcaagcgtaaaaggcagcagaaggcgtcagtgaaggggcagaggcgtagaaagagggcggccagaagacgcacattctccgcagtggaagtccataatctcgagaacgagagcgagctgctccgtaatttcgtccgaggcggcgagaccgccggtcgcgcccttggcgatgacggtcgtcagcaggggcgtgatgtaggcgtacgtcgtcgagtcgaacggcgcgtgctcagagagcgtccgcaagcggtagaggacacggagaaggaggccgtcgagcggctcctccgtgtactgctccggaataccgagcgtgccaaagttgcggaggatagcaacgccgatgaaagaccggagcgactcgagccgggccgagcagcagtcgccgagacggaggaacgtccggaaggcatcgtcaccgacgaggaacgagcccttgtcgagcgggccgtccatgatcagctggaggacgtcggtcaggcgtgccctgaacggctcgacgtcggccgtgatgagactgcggatgacggcgagaccccgtgccatctgctgctggacggcctggatctgggccttgacgtcagcctcgaacttggtctgctggctgacgagcgcctggtcggccttggagagggcgccgccagcggtcgcggcctttttcttggcggctgactcgcgtacttccttctcccacttgtcgagcgcactgttgcggtttgctgccggcaggtcggtcgtcttctttgcgagaacgtcgacaaagagcgagccctcgggcgtcgcccagatgccgagctcctggggaccgatgaagtcgaggttctgcgggtcgaggtccgatcgagcgctggcgaggaactgctgggtgagcacgtcgggcgagatgaaggcgagcgtccgtgccgcccggtaggcggccttggcaaaggcgacgctcttgacgggcacggccgtcgcatccgtaaacagcttgagcaggcgcgactcggtccgctcgacgagcttagccgggtcgacgccctggccgacgacaatgtcgacaaacgactgcatcgagaaggcgccgagctcctcatggtgggaaagcatcagaaggtctgcgagaccctcgtcgcggacattctcgggcgtgtcgaccgggaaggcggcagccgccgtaagaatctggagaatctgcttggagcgagcgtcggccgagagcgtctcttgcgaggagggaacgggcttggcctcgcgctgaaggagccaccccttgagcgcgtcgcggatgacgcggctggcaaccttggggttctgctggacagacgcacgcaggctggcgagcgcatcgcgccggaccgaggcgtgctcggtcacgaaagaaaggtgaatgaaggagagaccgagctggatcctggtagttgggaagagcgtcggccgtcagtgctgcgactcgactacgtctgtgacgcaagagacgcaagaataacgaacctcagggcctcgtccttggcgagcttgtcgtcaaagcggccgacaaaggcctggagaccacgcaggagccaaacctcctcctcggccgaggcagcgcggcgctgagccttctcccacagcaggaaggacggcttgggcgaggtcgcagtgatgccttggaggatggggttcgtcgcgagcagggacgctggaggaatggcggcggatgcaggcgatcagcgaagctccccatgtcgacttgttgtggcaggctcggctcactgatggcggcactcttcgaccggctgagcgggccgagcaggacggcagcggcgacaaagccctcgccgacgccggcagcggccgtgagggcgttggccgagacgttcttgaggctgacatcggcaagcgtcttgccggcaacctctgcaaatttgtcggcctgctcggtccaccgctcgggcgactcgccgagcgtccagagagtgtcaccgacgcagacgacgacagcccggcgagtcgcagccttgggcgaggcaagctccttctggagcgctgtcatcgcagcggcagggatcgcttcgttggctgcaagcgtgacggcgaggttggtcgacagcgtctgaaggagcgagacgagtgcaggctcggacgtcgtctctttagcgatctgggcgggcagaatggcgacgaccttggccgccgtcgccggcgaggctgggaagaaccggatcatcgagtagagcgagatgcggtggtcggcgttggccgtcttgccagacttgatgagagcgagcatctcgtcgaggatcgcagcctcggcctgggcgccggcctcaaggtcctggtcgagcttggcgacgagggcggcaaagaaggagacggccgccgtccggacctcggccttggtcgacttggcatgcagcaggacgggcgcgagcagcttggtcgaggcgtaaggaccgagcgagaacgaggcgatgtgagggatcgtcgcagagagcgcgacaaagccggtctcggggctcttgacaaacgtcttttcagacgcgacgagcagcgcatcaaacgcagcctgatcgaggaagcgctggaagaacatgcggagcgacgactgacggacaggagcgaaatcaaagggttagcgcgagaagcgcaggaccagcagtggcggcagccgaacgcacccagacgtgagcgccctgcatgccggtggcattgagagcgcccgccttccagcagtcgaggacggcgtccttgacctcagctacgtagccctcgccgataccgccggcagagcccttggtcttttcgcccgtagcgcgaaggtgcaggcaaacgtcgatggtgagaccgaggagaggcagcagcttggttgccgatggcgcggcagacccagtcaccggcgtcgtcaacagacgaaggacaaccgggagcgacgccgagttcgtgcgaagtgtgcgccgagtctttttgatggctcccttgcggacagagggcttgaggccacgctcagcatcgaggacggcctcgagcgacagggcaagcgcgtagacgagcgacgccaagctctccgactcctcagacgtctggagctgcagcgagagaaggccgttcaggtgaaggacgagggcgaagaaggtcgacggcgcgacggcagcgctgcgcataatcaggagagagtggcacgcgatcagctgctggtcgatgcttcggcaagctgcgatggaggctgagcgcaccttccagttttgggcaggcagcgctggacctcagcctcagcccaggcggtccagctggcgccagacgagccctcggcatcggcctgagcgagggcagtcagcgtagcgatgacggcctctgtcgatgccaggtcagggtagcgaccggcaaaggcgagcacgctctcgacagcctcttcggcctgcgatgaaaggacatctgcagcgagcggataagcagacgatatcaatattcagacaggccagcttctagaagaggtcgttaacgtacctcctttagcagcctgctcgcggagctcagcgagtgccgtcagacgctccttgttgcggccccggctgaggaccgcctgaagctcctcgatgtcgaggccatgagccgacgcgtcatcgtcgtcgtccgagatcggctcgccctcggtgttgaagcgggtcggcgtggccgatgcccagccagaaatgtccttcttgtggcgaccgccggccgcgggcggcgccttgcgctccgaggcgagcagcttcgcaaagctggctttggccggaatggtggggaggaagaggaggggtttcacgcggtgtgggagagcgccagacagtcttaaggagagagcgaccaagtccgaggggatagagggaccggagcagggatgaagggtaggagggagaaaggagagggctgaaagttggcctggagaccggcacaaagggcgaactgccgcgtcctaaatcgacatttaaaaaggcggcgtaatgcgcggatcacaacctctgggagcttcattcaagtcgcttcttgatgccgacgcctcgaggctcgggcgcagctcgcccctcctcgaagccagcaaccgtcaccctttcgcctcgccccatggtccgctttaaagtacgaccgacagctcgctggcacaaggacacgctgaatctgacgccgatctgctctttcagaatcgctggctgctcgttgagtttgtcttcccctcgtcgcagcaggtcccagccgcgctcgcgctctcacctctggcaggcacgaccagcagcaacgccgccgtcggcagctcaaacggcagcgaaccaaaggacaaaggcaaagggaagcgcaaggcaccgccaagaaagacgtcgaagcgaaagcggagggattcaggtaacgccgagggcgagatcgcctcgtcgtcggacgaggacgattcggaagcgtcagacgacgacggcccaggcgcgctcgacgatccaaagcccttcctccacccatcgcacccgctccttctgccgccgccaccgagtgggtcgggccagccgagggtgttgggcgagaaggccattcacacggcgctcaaggcaagcatgctccaggcctttggcgacgacggctgggccaaggtagcgagcaacacgaatggtgcgtccctctttctcgctcgtggcaaggagccagtcccccgcccttggctgatgctacccctgcctggctccagtcaagtactattcgagccagacgcagacggccatcatccggacgagccgcgaccactatcgcctgcttcaggccgcgctcgccttcctcgggccggtcaacaacgagcgtgtcatcgccaacgtcctgcacgtctcgggtgagtccatccatttgaacgtttgaactcgcgacagggacggcagctaacgttcttgccggtctttgtctcccaatgtctctcggcagggacaataaagaagatccagctccgacagatcgcgcacaaccggttgctagttgcgacggtattggcctcactcgcactcccgccagtcgtgggcgagaagccgctcgtcctccctgcgccgacagcagggaccgtgacgccgtcgactgaggaggaggaggaggagcgcgagcggcgctggagggcctgggaggccacggaggcgaccgtcattggcgggatcatcgattgaatgcggactttatgcctcgtgtacttcagaagggagctttgccttggcaaagggccacagacttgtccgaatcacgagaagtcgcgcggcgtagtatgaggagggcgactgcgcggccggcaccgcttgaaattcgtttcggcgcgcagagaccaaccagctcgacctccaaagccgcaacctccaactcacttgacgcctccgctctcttcaggactctatcatggctacccagtacgtacgaaccgtcagcgagacgtctgatgccggcgtgcgagtccagctagcggtgaactgacgagccgatttctttccgcgcagactccccccgccgaagcgggtcaagctctccggtccgtcgctcgacgtacccaagccggtcatccccaaggcggcgaccgtcgtcgtccagttccggagctcggtcgacggctcatcgatgggccccgccgtcagccttccggctgacaccggacgcgacggcatggagatgctcgtcaaccggctcaagggcgtcgacgacgtgcgttctctcgtgccctccctcgacacgcctgtccagacctgacgcatactccgtacctttcttcgcgtgcaggacgagccgacgccgtttgcattctcgctcctgatcccgaacccggagccttcgacgtcgttcgagccggccgagccgatcaagctcccgctgccgacctcgctccaggctgacattctcgcgcctacgccggcttccattgccgttctccgcgcgcacctcggcggcgacttcaccctcccgtccttctcggccgaagacgtctttacgatcctctgcgagccgcaggccatcttcaaggtccggcccgtcagccggtgctcgtcgaccctctcgggccactcgtccccgatcctctgctgcgccgtctcgccctcgggcaagtacgccgcgaccggtgcgggtgacgcgacggcgcgcatctgggacctcgagagcgagctgcccaagtcgacgctcgtcggccacaagggctgggtcctctgtgtcgcttgggacccgctcgagcgttacctcgcgactggaggccatgacggccacgtccgcatctgggacgtcaagacgggcaagccgctcggtgaggcgctcaagggccactcgaagtggatcacgagcgtcgcctgggagccgagtcactcgtgcgttctcccgctcatcaccccgctcagtaaggcttgctgacgtcgactcttgcccgtctcctttagggcgagcacgacggcgccgcgcatagcgacatcgagcaaggacggcaccgttcgtgtttggagtctggccacccgacggaccgagtacacccttggcggccacacggcttcggtcaatgtcgtcaagtggggcggcgagggcctcctttacacggcgagcagcgaccggacggttcgtgtctggaacgctgacgacggtaagctcgtccggatcctgaccgagcatgcccactgggtcacgacgatggcgctctcaaacgaccacgcgctccggaccggtccgtttggccacgagggcaagcgaccgaaggacgacgaggagggtgcgtgtcttgagagttccttaagaagagctagccggcccacgtctgacatcaactcctttgccaccctcagcgaagattcaggcgctcgagcgttaccgtacggcaaccctgacggcgcccgagacgatcatcaccggctcggacgaccacacgctcttcctctggccgccgcagcacaccgcggccggctcggcgacgcccaagaagagcgtcgcccggctgacgggccaccagaaggccgtctcgcacgtctgcttctcgcccgacggccggctgattgcctcggctggacttgacaacagcgtcaagctctgggacggcgtgaccggtcgcttccgggcgtcgctccggggccacgtcgcggccgtctaccggctcgcctggtcgtccgactcgcgcatggtcatcagcgcgagcaaggactcgacgctcaagatctgggacctcagaacgaacaagatcaagacggacctgccgggccacacggacgagatctactgcgttgactgggtcgccgacaaggtcgtcagcggcgggcgcgacaagactgtcaagatgtacgtcggcttgctttctcttccttcgctcggccgccgagagttgctgactgccctcttgttccctctcgtctgtcgtcgatcagctggaagcactagtctttggtccactcgacgactccaaaatccggccagagagtggcatttgctgggcggcgcggagaggtagcgcagaggtcaggcgagggtgccggtcgccgctactctcgcgcttctcctcgagcatggtccgcccgcatcgacgtcttcatagacatttgacggcctgggcgatctggtgacctgcacttaatggagcagtcggtcggtcggtcggttgcttgttcgtcaacatgtttcgtcctcgtctagatgttgcgccccttgcaaacacgtgtctccagagaataacctgatctcagtgccctggacgagcgaaagtgtttggggttggggaggatcagtctaaggtaccgtctgcaggcagtcttgctggcgcgcgggccgaggacgacggcggccaatcgcgaggccagtcgatcctccggccttcctgaacgaccttgaccgccaccacattcaccccctccctgagaccctctcgcccagacatgtccaggtcactccttcgtctcggcgctcggctccctccgacggccctcagcctcggttcggcaccggccaccgctgtcctcggcggcgttcgccaggcggtcgctgtccgctcgggccgaccatcgcaggcccgctcgctcggtgcgtcctctcctctcgatccatcttctgctcaagctgtcttttcacgcgaaagagctgcctgatgtctgggagccggccgggctgctctcgatgggcagggcggggagggtcggaggtcttcaaggaaggtctcttgcgaccctcagggctcgtcaagaggccaggtcggggccatcgaagcggcagctcgactcagccctgcgcctcacacccagcactctcaaacgacggatggctgaccaacttgagccgtttgagttgcagcccagcccagcacggcgccgttcgccgagccggccggcatcaacccggccgctgccgagggcttcagcgaggcgactgagaagctgcacgactatggccaggtccgtcccgccctgctcaccctcgctccgcctcatgctttcttttggctacacggagttgttttgggatctcttgcttggaggcaaggcggtggttcatggggtctgaaaggcagggtggaaaagggtggacagcgtgcgagcagcctcgcgtccgccctgccgcaagcggagggcgctggattcgctcatcctctgctcgcctcggctctctactttcacgaaaggatcactgacgcccagtccattgcacctacttcgcctcctcctgtctgcgctccgatctttcttcgtcaccgcggccgtcgtcacctcgctcctcggctcccccgcgcgcaacccgatcccggtcaacgcttctccttcaccgctcgtccactacacagtacctgacgtcgtgcctgcccaagtacctctcgcaatacaccgtctacaaagacgagctcaccgtcttctgcgcgccgcaggacgtccttcacgtcctccgcttccttaaggatcacagccagtgcctctaccgggcttgcatggacattacggccgtcgactacccgacgaggtgcgtcttccctgtctctcatctgtgacagttggtctgtcgtgctcggctggtcattgcggcgtcgggcgtcgaatgaagaccgcaggagctcaggagacctcgacgtcggtagcaggggacagtgtgttgccaagcgaacgccatgccggagccggaagatgcaaaagagtcgtgagctcactagctgaccatcgagctctcctcactctcctccactcgctcagggagaaccgcttcgaggttgtttacaacctcctctcgcacgcccacgcctcgcggatccgcgtcaagacgttctgctcggagctcacgcccgtcccgtcggctgtgcccatcttccgcggcgccgactggttcgagcgcgaggtctgggacatgtttggcagtgcgtccagatcttgccctcactctgatcacgtctgctcaggaagcctgacgccctgctcgccttgcgctcggtcacagtcttcttcgagggccaccccgacctccggcggatcctgaccgactacggcttcgagggccacccgctccgcaaggacttcccccttacggtccgtcgtcgcccctttgcgcacgctttgacaaccaggcgacacatcgactgacgttgcctctgcacgctcgtgacagggctacactgaggtccggtactcggaggagaagaagcgcgtcatctacgagcctctccagctgacgcaggcgttccgcaactttgagagcgcgagcccatgggagcaggtcggacctggcgtcgagacgcggccggaggtgcgtcattttcacgcgtccttgaccttcgcgcaagaatccaagctgagcatactctcgctcgctcattcgaccgctgcagtcgttcaagattcccgagcccaagaaggaggaggagcagaagaagtgagggctctccggaagaagagtgctctgtcccgtgaacatatgactgggttcgatctgatccacggtgggcaaccggaggcggagtcgtagtaagattgcaaagcgacatggctcgagcgaggacacaacgacgaagagcggagagggtggagaagggggcgagctttatgcgctctcgaggtccttgaggaaggcctgggccgaggcgtcggacgaggccgagaggatctgtagtcaacggcatggcagagtgggcctcaggtcagctttcattcttctacctgcttgacacattccggcaaggcgagccgagagaggcgcgaaggtcgagatcaaggaaggagagaggaggtgcgcggttgggcgatgacgacgagaagacacgcaccgccttgagcttctcgacatactcggccttggcctcgtcggccgacttgcccttgatgccgtcccaagcggtccacttggccttgccgacaaagtcgactggcagagcgaaggagagaagagagggtcagccggtaagccctttgatgggcatcagtcggacgggactatcggctgggcggcgctcgcgacgagacaggctcaacctccgacggccggtgctgagaaacgagaaagaggacgtacacatgcccggcttagccgtgttgcagtcgccaaccgaggctggcaagtgagcaggagatggaggctagtcagcctctcgatgagggtgcgagcccgttgctcttcccggcggacgtcctcgccactgcaatgcaggctaggccgcccgccgatggttcagagggagattgcaggaagagagcagatgcagacgaaccctgcttgaagcgggcgtaaaactgcaggtcgatggcaaaggtcggcgaggtcagcaagggaaggcgcagagcaggcaaaggtgcgagagggacagacgtagagcttgtcgtcgtcggttggcttgacggcgccatcgggcgggagagcgccgacgatctcgacagccttcttgaactgcgactcggacatgttgactggatgagggtgttgttgaggggtgaggggagggcgggatgacggtgtgatggttggggagcgagacgacagcgcgggcagcgggcgtcgacgggcgcagccaatctctccccgtcgctcgaacccctccgaggtcctgaaggcttcgaagcaaggcaggtctagcatgaaagaaacgtgcgcgcgtgtgcgagaacgaagaggacgggaactacgacgaggaggaagtgctttgcaagcggtcgtgtgcgggcgcgggacggacgatgacgggagagaaggaggcgggggatcgtacaaggtgggaatcgggcgagaagacgagggcaatgggtttacaatgggtgatgagctgagacagaatgctggacagccgatggacaatcgccgccgcgtgtgagctcgaacggggcgagcaacatggcgggccgaaggtgagagggcgccctaaaccggaatgtcctcgagcttgctaatgatggcctctagcatccggttctcacctccttggccttcgcgtcccatcagcgctccaacgcgcgcgagttcagcccggacagccgagccgagtgtgtcgagcacgtccttagtgtaggcgaacgactgggtctccttccgcatgaagtcgacgcagtggtggagcatgacggcatccttgggcttcttctggagggtatctggcgggccaaagggataaagtcagctatcaggggcgggcaagtcggtcaagggccgccttgaaaggcacgcactgatgacgatccgcgaggccgggttctcccgaatcgcgtggatgatcgggaaggagaacttgccctcggtcagatcttcggcaaagttcttgttgtcggcgtattccgatgactgcatgttcatgtagtcgtcccggatctggaagaagattgagatgaggttgacgagcgggacgaggtcgctgcaaaggccgaggaggggagggcgtcagcaggagcggtgagtgaaggtatgcttgaggcagacgaagctcacacgtcgcacgccgacttggccatcatgagcttgatggcaattcggaagaggccgccggtctctgagggagaggagaagagcaaaggggagtaagtctcgcgccctgcggagaaaagtagctcgcctatagaaagcggcgcttatcccgaggtgggctgaggcggcatgaccaggaggatgcggacgcactgccaaggaccatcttgacgtactcgtcctcggtcggacacgtcaggctgtcgcgccagaagagctcgagaccctggccacggtgcagcgagagcatctcctctgtggccagccagggaggaagatacagaggcaaatgtcaggcagtcagcctttggccagaagacgcgcaggagcagaggctttgagaacggaccagtgacgatccggtcgaggttgtcgtcctttctcgcctggtcgatggccgaggccaccaccgctctgcccgatgccgacgagcccatcaccggaccgccagccgaggtcgtcgaggtcgcgagcggaggagtggccgtcccgtccatcgaggttgaggttgccgtcggacatacgacagtcgaggaggaggaggatgacgagcggtgtgggagcgtcggcagctgaagtcccttcgtcgacgatggtgacggagacgacgaggagactgctggtgctacttgcgctggtgctgatgtcaatgctgatgagggctcgtcatcccaacgcagaccgagcttcgcgccaagccggtgcgcgatggtctccttcgccgacgccttggggtcgaccgcatccagtgccgccgacgatgccgctccagcctccgctctcctctcctcgacctcatcacgtgcgccaggcgtcggcacccggcctgctcctggccgcggcgacagcggcggcgtgatgagccggtccttgtcggcctttagcgcggcggcttgccgattcgaggacgacgagggccggccggacgagcggagccggctgctcccgctactgctgctgctactgctgctgttgccgtcctcacggctgctgctccttcggccattgatgctgccgccactgctgctcccactggccgaaggcggggctgagcgcatcgcgaccggcgaaggcctcagcttgagcagctcctggtacgccaaaaagtaaacgtagttggccgtgttgatcgtctgaggcacgccgtagatgaggtgggcgaccggctggccccggcggaggaccgacgagtcctcgacatcgtccatcaggagcgacgacgtgtgaagcatgccgacaaccttgttgatgatgcgcagctccggtgggtcgacgttgagccagaagttgaaggcctcgatcagctgcgagcggacattcttgccggagttttgggctgagggcggatcgggtgacggttgcaggtcatgcgagaggagggagtgaggggaaggccaagtacagaggtcagctccggaggttcaagcacgcgacaaataagtctcgggttgccgcgcgactagacgacctcatcgggcgaggcggcggccctgataagctgctgacttcgaggtcgaagccagttcgccgtgagctcggctcgacccgaccagtcttggcccgtgctttcgccccgcgaccaagtcgacaagtgctccagacagcccttccgccagctggccaccttgccgcggcctagcaaggaaggaagaagagagcgggacgcaccaagatagttgtacggctcaagctggagattggtcgaacgtagggccggcgccgagcacgaggaggacgaggtgatgggagcgttgcatgcgcgcgcgaagagcgatcggcggcgacggcagagaggagcgtcgtcggtcgtccgtggtcgtttgaggcagacggcgaccgggcgagagcaggagtttgaacacgaagacgagcatatcgacagggtgtggccggatagacgcaaggaagggaggcggaggagggaagcgagggagcaatcgggctcgtcagcgccgtaacgggggtctgagacgcgagcgagcgcgagaggacgaacgagaatgcggtcgtcctcctcggtaaagggcaggatccggctgaggacgtcggcaaagtcgctggccggcatgactgctagcgtaggggatggatgagggagaggggagagagaggctcggaggggtgaccggagaaggtcggcggcgcaaggaggaggttcggccattcggcgacgcaaggccggcaagggatcgggccctcctcgtcctcgcaagccgcttggcgacagcagctgccgacgacacccgcccaatttgcagagtgcagaggagccaggaggagcacgcggggagtcgagcttcatcaatatacagcagctttttgaacggcttcgaacaggacgacagggcgaagctgcttccaggtggtgacgccggagccgaagagacgaggagggcactcaacgcgcgcagcagcacgcagccttcgaacctctgctggcctgcttccgccggttctggccgcgctgacccgggcgctctctactcttttgacgacagcgtcgacaagggatgaaaggcacaaagtccacgccggcactctatggcgttccggaaaccgggcttccgcccccgccgccagagatgagcgtccgcaaggtcgtcttccgcctcgggagcgacttgaaccagcccttgccgctgctgccgccgctcgtcggcgaggcgcttgtcggcgaagacggcgagcctgacgtgctcccacctacctgctgccgctgcccgctcgagccctcgcccgcacggtcgatgacgagcggcggcggccgatggcgcctagcgtcggtggtaggaggcggcccttccttcggcagctgagatgacggccggccgacaatcgtacttgcgtccgagacgtcacgcccgtgaccctgcccagcagggccagacgaaaaggacgaggacgaggacgccgtcgaggagcgcatgaagctcggccggcgcatgccaaagtcgtcgacctcggcgccgttgacgctcgtggcggccgagcggctgacgagcgtactgtcgccctcgccgtcgtcgccggcagacggaccgttcggaaccgaaggaagagacgagggcccagaggcttcttcagtgcggcgcaaggttccgccgtcgtcggcccgccttatggggtctgaccgttggtcggcgacgagcgagttgagtcgggccgggagcgacgtcgtcggtggccggccggagtgcccattgccagctgccgcagcggcagcagcagccgagttgtgagcctcagcccgagcggcaattgcgtgacggtcggctgcctggctgtcgagccagccgaggaagtcgagcgggagctcgcgcaggggccggtgccgacgtgcgacgaagcggaggggccgaagcgaggaaaacgacgagcgcgacgatggccttggcgagcccagtgaaagcagggtaggcagaaggccgccgcctgcgcctccgacgcttgcagacgtcgagccagcgttgcctgtgcttccgccgttgatcgccgccggcgggagaaggagcgcaaaggctgcgccggaagcgggcgtcgcagcgaggaggtcgacttcggtcggcaggcagaacgggagcatgaagcgcgagtcgagcagctccccaaggctctcgggcgcctgaggcggctcgtactggccgagtgggacatctgggtcgaacaggaggtcgaccgccattgccgggtcaggaagcgagatggagcgaccgtcaccggctgccgagggtccggctgccgagccgtagacgtcgaaccggagcgcctgcgcctgctgccgctcatactcggccgaaagtcgctcacgctggagcgtctcgacgccgagtcggacacgccgccgctcccagtccttttgcagctgagcgaggtactgcgcacactcgtccgacatgcggccctcaccaacctcgtaacggtagtcgcggacggcgcggcgcatctggagcggattgagcgcgcggagcgacgagagcgtgacgatgagaccgtcaaagtcgtcgagcgccgaacacgtttggatccagccgagcagctgaacggccggctcgagatgacgcgatgaaatctggccgggcaagtcggcgtcgcggacccagtcggcgagggacgtcaagttcatgcggacctgcacggccttcgagcggcagaggtagcgcttccgggtgaggatccggttgaatgtctcgcagccgatccaatagaagcactgcgagatggcctgcgtgatgacggccgggttgacctcgtacagctgaagaacgacgagagccgacgtcaggaaggtcgtcagggtccgcggcgtcaccgctgcaggcgctgtggcggcggcagcatcgtcgctcggccggtgtgttgagccgccggctgcggttggactcgaccgcccaagcgagctgaagtctgagatcgaggtcggtcggctcgagcctgcggcgccatcttgtcgtaagccagcgtcggccgatgacaccggctggcccgtctggcttcgctgccgaccggcctcaccgctcgagggccagccgccaccaccgtcgccttcagcacgcgccggtgagctcgtcgccgccgagaagaggtccttggcccggggaaccatgcgctcggccgcccgcttagccgtcgtcgttcctcgcccggtcaaattcttgagaaacgaccactcgccctcaaaggcgaggccggcaaactcctcggacatgggctcaaaatcgagcagggcggcgtcgaggtacgtgtcgactcgccgctcgatgaagcggatgacaaagacatggatggcgttacagagctcctgtggatgaaggggcaggatcagctccctcccagggctgcagaagcttaagcagggggcgcacctcgagcatgacaaaaaggttcagctcatggcacgcgaggccgagcgccgggtcgcgccggaggaggtggaggaggagcgtcgagttgaacacccaaaaggccaggtgggcgagatcgtcaacgttgtcctgcggacggaggaaagggaagcgtcaataacgtggtcgaagcgtaacactcgcgctgtgagcaggcaggacacgcacatagacgctcttctcaactcggtctacgaccccgacgatgagctcctcgagccactcatcgtcgcatcggtggagcgcgaacttcgcaaagagaaagatggcgtgggccggtgcggctcgccaggcgcgcgggtgcgcgcggggctcgtaagaggcgatcaacgagtcgagcagggagggcagggagggcaatgagaagaccaggaacgagtggtagggaggaggctcctttcgggatgagccgggcggcgtcagcacaaggggagacgaaaagtaagagtggcagcgggtgggacgcacgttatcgacgcgagcgtcagagtcgccgtcgtcatcatcctcgctgtcgctctcgtcggagccgctcgagcagccgttctgcccgagagcgtgcgcggtgccgaccgtccgtcggccagttcgcttgagccgcctgagcttctcttcctcgccgtcgactgcctcgtcgtcgtcttcccagcatcggtcgagcaagtatcgcggctcgacccctgccatcgcagcgacgtcagccatccagcgctccttttcagcccggagccggcgcttgttctctgcccgccagtggagctgggcgcgagcgaccgcggctggaagcgcgttggcagtcggctgccgtctgagccctggcgcacgaagtgcgcttgcggcggggaaggtcgcctctgagatggcgccaggtgagccgaacgcggccgatgacggcgaagcgagagggatcggaggtgaggtcatggccgacgccaaaagtgccatcagcggcgtatgagacggcagctcggtcacgacgtctctggaagaaggagaccacgtggtcagtcgactggcgagcccatcgcccagcataggattgagaacgcacagcggggtcagccctttggacgtgatggcgtgcgggtcagcgccgagcgtcaggagaaacgaaagcagaggaggcgtcgagacgagcgccgcatgatgcagaggcgtccaaccggctgccgtgcggtagcgcaagctcaggggtcagcaggaagcgtatgaaagctcggccatcgcagcatctcgggtgaaccggcggagaatcggccggcacagactcacctcggtcgctctgagccacgccactcgcgccagcaaggagccggacggcctcctctcggtcttcacgaccggccgagccgaggatggccaggctgacgagcccgcagccgtcgtcgtcgaccgcgtcgagaggaaggatcgcccgctagcacgaagtcccgcgcacacgggtcagtctttggagcagcgaccgtcgccgagagcatacaaggcagacgcacagcatgcggcgggaggtcgagcagccagcagacgagctccggctcggcctggcgcgcagcgaacgtgagcgcgtgccggaggagcggctcgaggtcatgcgccggcaggtcgaggaatggctggacgttctcgtgcgttgggtaaagcgggagcgggggactggagtcgaattgagatcgggaaaaggtcgcaagggagtcagcaacggcagcgttgacgagcttcgacggacggcagcaggagagggctggaaggagctgccggaggacgggtggagacgcacgctgaaagcgagtaggctccgccagctgtactgccggctgacatgttggagccgaaggacgcgcgtgagtgctgggcctccatactgaccgacatgccggctgagtcgaagctagggctcgagggacggtcgcgctaagcaggaaggagaggcggtcggtgcgccggttcctggacgacgcttggcttctctgcctagcggctgcctcttggtacgtctgacctgacggccagggcgtcgctcagtccaggggaggacctgagagttggagagggctgggcactgtgaaggcgcaagaggctggtcgtcgtttgagatggttgatcgacgagagccggcggcggaggtcggccggcgcgagccagagccggcgcaacacgcctcgaaatgctgagcggacgagtctgccggccaaccccccgtaagtcacgacgcccgacgttccgcgcgcgcaagatctcaagaacaggccatggatctgaatggcccttgtctggcatcctctctccgattcagaccttaaaagccgaactgggcgagcttctcgttcgcggggaccgaggcagcggccttgacgcggagcttggtggcagccaccttgcgctcgtggtaggcgagggccttgaccttgcgcttctcctcgagtgtgtcgacaacgtccttgtagccccatccgacctcgtgcgagagccgcttgagcgtgcagtacttgcggccgggcttgagccggaggacacgcagagcctggggaacgaccatcttcttcttgcggtcgtacggagggggcatgccctcgtagagcttcaggcgctcgagggcggccttgccgcgcgacgacttgtgggcgaccatgccgcggatggccttgtacaggatccgcgagggggcgcggaagtggaaaggtcccgacttgttggggttgaccaggtgccgcttgtggaggtagttgtggtaacgcagctgaagggggcaggcggcagggtcgaggtcagcaacgggtcgagctggtcaaaccagcacggaaagcacggcgggcacaccttgttccggaagaacgagccggagacgttaatctcctcgcaccggacgaccgtgaccttctgtccgttgaggatctgcttggccagggtggacgcgagccgaccgagaaggtggcccttgccgtcgacaatgatgggggcggctaggaagacgaacgagaggatcctggtcagacctctggttccggcgagacaggcagctgtgagctatgtccgacccagtcccatccaaccccttccccttgcaagccctccctcctccctagcgagctgggcagcctagccgatcgtctgccgtacagcgctgacgctcggacgaccctggcccgtgggctcgtctcggcgcacaacgtcgccgagcattcgctgctgcgagcagcacgaagcccctcacgcccggcctgcatggaacaggcagacgcctgctgctcgctgccgaggaaggagttgagcgcgcggagcagacgagcctgagctcgccgagctgggtgccgcccggtcgggcacccgggcaacgcgcgcctttgcccagcaggacgcctgcctctcagtcggtcggccgcacaggctggaagcagaggctgcacactgcggcaggcctctgcgtgggggagggcctaagaagagagctgctgggagggaagaaggaggacctggacgcgagctcgagctgggcggagagcttgggactgacaagagaaagtggccatctggaagcgacgaggtaagaaggtcagcgtttcggtctttcggaggtctgcctctggccagctagcacgcataccgcgaaacgagtgaggacgagcagagcaggcgtaccttggagttcttgacgttcgacgagacgagaggtcggagcgaggcgggcgcggactgagctgcgacccgggagcggccggcgcctgcgcgcagcgcgagccctccgcgcgggaggcatcctgcgcgcgcggggcggcccgcggtcattcccaggagcgatcggttgggggctaaccccgaacgttcgggtagcattttgggcctggaaaacagcaaggtagcgctcgaaccgaccctcaccaacaatgtctcgactggacttgaccaacactgctcgaaacaggcggaggacgatcccagcaggcaccgaaagttgctctccatctccttcttcgtagcacagcgtcggaaggtggcgcgaaaagccggctcatcaagatctgcgcgtcctgcgctaaagcttgagcgcggtcccgtcgacgggccggtcggacccacccggattggcattctgtcgccggccttggcggtcgaacttcttggcgtctttgccgatgacggtgacctgcgtgacagggagaaaggcgccggagtcagtcgtctgcttcctgacgcacacgaatgcgcaagagataactcacgcccttgccctccttgacgagcgtcttgagcgcctcatccttcgcctggcgggtgccgacccgcttcctgcccgactggccggccatgccctccatcgcctcgagctggtcgcgatgcttgcgcttgcgcttcttgtccttgccgtgccgcgcgcgcttctcgcccggcgtaagctcggacgaggcgacgagcgcagatgccgagggcggattgaagacctcttcgggcgcaagcagggtcgaggcccgaagtgtcggtggcagggccgactcgagcgagattgaggccgtgttggagatcgactggatgtgagctttgggctgcaggagaccagtgcgaagggaggtagtggtcagtgtcgcatcgtgatggctccttgactcgcaccgacgacgcacctgcttcggcgtgaagttggcgtttgagagcgcgtcgagcttatagcagatctcgtcccaagcctgctcgatctcctcgtgctcctttgcgagcttggcgtccttctcgccgagcggggccttgccgcccttggcccgggccgacgaggctgtgtactcgtcctcgtaaatctgggcgagcgaccgcgtcgacttctcgtccgagagctcgaatacacgcgagggaaggaacggcttggcgtcgagcggacgtcggcgctccacgtcgttgtagttgttctgaagcgatgaattgcgcgagacatggtcagtcgatggcgaggcccaaaatgagaaaggcaagccgcacctcgagaatgcgctgcttgatcttctcctcgaggttcttgaccttctcctcggtgacgaggggcacctgcttgccgaccgtgtcaaactcgaggtcctcctcgaggacagcgttgagcggccgggcccgggacgaggcctcgcccgcaagtgcccactgctttggcccagcattctcggcctcgagcgaggcaatctgggcgttgagcgcggcgagccgcttagcgtgcgtcgattgcggcgctggaaagggcaatcgcgtgggacacggagatcagcccaagagggtgcagcccaagaggaaggaaatcgtaggcgtaccggtgtcggtctcctctgcctcgtcatcgtcggcaaagaggtccgtcttgcccttgcgggcgccgaaggcctcctcctcctccgcctcctcgtcgtcgtcctccatctcctcatcgtcctcaccctcgtcctcgtcctcgtcctcgtcctcgtcctcctcatcctcctcctcgccatcattctcctccgagacctccatcttttcgtcctcgtccaggtcgtcctccagctccatgtcgtccgcgcccgaccgccggccggccttgcccttggccttgccgccgccagccgccttctgggccttggcgtgcgcgcgcttggccgcacctgagggcggcttggagggcggggcgaagaagtcggcgtacttgacctctgcggcggagagggagtcgaaaatcagttgatgagatttacagacggggcgttggactactctttgaggccagcggatgatgcaaccggcgctcgtccacccgacgcgttccagcctgccgcggagcacatcgcgcaagaggccggcacctgcgcaaagatgactcggtcgacggacagcccagctgcacctctcgttcagagcgcccctcccgcagagtgcaacgaacagacgacgtaccgtcagtcccgaggccctcgccagcatcgaccgcctgcgcccagatgtcgcctccaggcgcgggcggcccgccgctcatcagcttctcaaagtcgtcctcgtcgtcgtcctcgtcatcctcgtcatcgtccatgccgccgtcagcgggcatctcgagcccggttgcatcgtcgtcgtcgtctggctccgaggcggactcgtcggcgccgagcgcgccagaggtgacgtcaagcgcctcgagctcctcggtctcgcggttgaaggcgtcgattgagaagaaggcgtcatcgagcgtcgggtgcgacctacgaagggaatggggagcgggcggaaggaatgtcgaggacgagtcggaatgaggcgcgcagcagcacgcagaggggtgagggcgaatgggttcagctgctgaggcgaacaggcaggcagacggccagcgcggtgcagcgctgcagcacaggtagggacgcacctccgagcgtcacgcttcgagccgggcgcatccaggtcggtgatgcgccggtgcgtgtcgtcctcctcatcctcgtcctcctcgctgacctgctcctcgtcgccataatcgagcccggcaaagtcgtcctcctcctcatcggccgaggggaaggccgggtcgtcaaagacgtccgggtccgagagcggcgactcgtcgtcgtcctcgtcgacctcttccgagccagacgcctcagagtccgacaagtcgtcgataccgtcgaacgcgctgtcgctgagctcctcgtcctcctcgtctgagtcgagcgcgattccccgcgcaagcttctcctcgcggctcagcccgccaccagcgtcctcgtctgcctcgtcgaggtcggcgaggatgccaaactggcccaggacgtcgacgagcttggccgcgcgcagctcgagctgctcccagacctgctcggcagcgaggtcggtcatgtagagcgcgtcgagcggcgtgggcggcagcgagggcagggagtcgtctggcgtcgacgaggggttctggatgacaagctcgcgaaggaacgactcgagcggcgggagcgatgtcggctcagagtcgagggctgaggggaaggtgccgaggtgatacgctgtgtattagctccgcgcgctccagcaaccgcctctgagactaagcccagcaggcaaccggcagctagcaaggacgcggaccgaccaatctggaagacgtccttgagcgcctgctccgaggcgagccggagggcgtccgagccagcaccaagcgcaaaggcgtgcggctcgtgctcgagcagctcagacagggcgccaaatgatggcgggttggccggccctgcggcgggggcgggggcggcagtggtcgacatggcgcgttctcgacagaaggtcggctctagcgatcctgtattgcgtctacaatgggagacagaaggtgtggcgggaggtcgggtgtcgaggtcgagctgttgctgacccctcctgctcgaagtttcgtctgcgcaggcggcgaaacgcgcacgcccgccgcttcctcagcccgtcgcgcctcgctctaccaccatcacctttctaccagctcgcccgtgcccgccatggtcgcgacctcggacctgccgccgcacgtgctcgacaagatccggccgagcctgtcgttctcgtcctcgccgctcctgctcgagcagcacgcaaagcacgaccttgccctcaagctcgacgcagaccgccagatctgccggctcaacctcgcgcccgaaggatgcccgctcggcgccgccctctgcccgctcaggcacaccgagcccgcagaggccaactttaagggcccaaagttgatgccgagccatccgcgcgagcgtgagcggctcaatactgtctgcaagcactggctccgcggcctctgcaagaaggtgcgccgcgtcgcctcttccttctcctgcgcgtgtgatcggtccagctgaccgcctttctcgcttctcgcgccttttccagggcgaccagtgcgagttcctgcacgagttcaacctccggcggatgcccgactgccactggctcctcaagtttggctactgctcggccggcgacgagtgcctctactaccacccgcacacgaagaagcgcatctgcgaagactatgcgcgcggcttctgctactacggtgcgtgcctaagatcgaactacgtacgcattcgatcactgacgtccaccctgcgtcgcatcgtcaaggtccggcttgccctcggcgacacatcccttcgaccctctgcccgctctacgccgccggcttctgcccctcgggcccgaattgcccgcagggccacccgaagccccgacctcccttgcccgaagcctatcggcccgcctcgccgccgagcgagacaccccctggcccccctccgcccggctacggccgctgggccgagtgggacccaaaggtcaggcgcggccggctctctccacgtggcgacgccacgaacgcgcctctttcacggaaccttacccctccccgccggcaggcgaggatggtgttcgccgagtaaggggggactgtgtgggcgagctttgtgatctcagcatggccgcaggtcgctgatagattccgaagggagcaaggcggcacatcgacaagccttgaaaacgacggctcaacggcaggagggcttgaaaagggcggctcaatggcaggcagaccctttaggaagcaagggatgtaggcaagagcctcaatccaatcctcactgagggtgtaaaaacccttgctcaattgggcctgcagtgttgaattatcgaccatactcgatcggtcatggagggagggcaccccgagtacacagggtggcatcgggggatgtccacgagagaagggccttcttctatttctcctccctcaccccctcctcctcctcctctcaacaaccccgacccaccctccacttcacagcatgccgtccgccgcccggcaccttctcagcctcatcgctctcgcgtcactcgccatcgtcgtctcgccagcggctgctctcgtccctgagccttataccatcgcctcctcgacgtgtcctgtagacgctccagcgggctgggttggttctcattgcggcagtgcaatttagggtcagttttgagagatcgcagtcagtgaaccgatgattcagactgagcaaagatgattttacgtctatcataggcaccggattccagacctatttctcgaacaatccatccgattcgagcaccatccagtcgccggctgactgtgccgccaaatgtccagctaatcccgcggtatgagcccccactcgtctgtgactgccgtgtcggagagcttaccccccgtcttcacttgtgcagttgttttttcacagaaagacgacaagcgtcctctgcgcctgcaggacggcggtgacatcgataaccgaacaagattgcagcacaaccaccttcagatacgaagtccgcgccgtcccgccgccacccgagccgtcgaacgcttccggtcgccgccgtgctgccgctcgtcgtcgtgcggccgaggagaacacgtcgctctgcccggcctcgctgacggcttgcaaaatcgacggctcgggcgacggctacgaggtgggccccttctcattgctttcctgcctgcttgaggccgctgatcgacctgactgcggccagtgcatcgacaccctgactgagctcgagtcgtgcggcggctgccggcacggtgtcttcacggcggcgaccagcgacgaccgcgtccgcatccagcgccagcagggtgtcagcctatcgacggccgccgtcgccgccgaggtcgctgctgtcggtatcgagtgcgtccttctccgcccaggccgtcgatcgagtagtccgagggctgacccgcgtccctcgctcgaccagctgctccgaccgcaagcgcttcagcccaggcttgacgtgccgcaagggcttctgcgaggcgatgtgacccggctagtctccgttaccctcctcctcctcctccttccctccctctcttctttctcttgggactctgtcatgatctgcttgacctgctgccagcccttgctaagatgagcggcgtccggccctgactcatctcgtctcggccgacccgtcttgcccacccaccggcctgctgccgactcgtcgccccgctcggtcagtctagcgcaagaagctcaacagcagagcaacctctccccttcctgcccctcgcccctgccctcaggtcttgagcgcaaggctcttgcgcttgatgacgacgaccgaggccacgctggctgcactctcgctccgctcgctcagcggcgacgatggcggcggccggggctcagactcgacagcggccttctctggcgacgaggctgcaagcggggcaagcagtcgaacagagccgaggtcgtcaaccttggttccttggaggggcgagcagaaggaaggtcctcggacgcaccggccatgtcaagcatctcctcgtccgcgtctgcctcctcttccaccggcaccggttcgtcgtcgccagtttcggccgcctcggcgtcgctgtcgtcgatccggtcggccgatttgtccgccgccgtcgttgaggtcgtccgtggcttcggcttcggtcgggccttcttggcctttgccggcatcttgccagcctcctcgtcgtgctcgtcttcctcgtctccgtcggccggaccggtcgaaggacgcttgcgcttgccggcagctcttgcggcaccagtcagcgacgttggcggcggtgacgagccatcggcctcggcggcgacctgcttgcgtgcaccctttgcgatccgcgagtccttggccatgagcgacgacagctggcgggcaaaggcgagcaaaagagtgagcgaggtcttgtcagccccggcgccgagactctacacgcccgccggccccgactcacccgcttgtcgtacgcccgctgatggtcccacgccttgtcggcctttacctcgacgccagccgacgcgaggcaaccagccagatggctgtggatggcgagcgcctcccggccaacggcaccggccagcagcggcaacagcgtcttgaacaggccgagcgccttctcgagcttaggccgattcgcccggtcggcatgctcacggacgaccttgatgagccagtcgagcaggctcgtgtggatctccagcagcgaccgagactcgatccggccgaggatcgtaaagtgcgggcctgggaccacgagcacgctgctgagcaccttggccagcgcaaggagctcgtcctcgtcgacgtcgctggccatgaagaggctaccggcctagagccgaccgggagtacagcagcaggaggagcgcagcagtcagcacagtcaggagtaggagcagggcaggcgagccgacgtacgtcttggatcgccttgatgacgacccgagccgccgtcgaggccgccgatccatagcaggcggcgccccggatgaattcggccagccgcttgcagagctcatcgtactcgggcccaaagcgaccgagatgggcgaggacgacggcggcgtgctcgaggtcgagcacctcactcagcagtgcctggatgaaggtcgtaatgaggtagttgaagcgccagcgggcctgaagggcggcctcgccgagctcggcattgtctacaaacgagtataggctgaataagctccaaggtacgggagacatggacgctggacgcaccctgacggctgttgcgctttcgctgcttggccttggccgttcgctttcggggcttttcttcgccgtcctcgtcctcatctgtcgccgagccagactcctcgtcggagccagcctctttgtcctggagctgcgagcgctcttcgtcggcctcaatcagctcctcagcgtacttgtcgatttcggcctgaacgaagccggcgcagcgccactggacctggtcatcgagcgagaggtggagcgctggctcgagctgccgcttctgcgcagccttgcgatgcaagtcatcgaccgggatcgggttgaagaagatgaagacggtcaggagcagccggaagctctgcgggcgtgatggcaagcgaaagatcgacgagagtcagcagggtcgcggacagtgatggccagtccagccttcgaaggacacactgtccgccggatcgtctcgacggcgcttgactgggtgccgatcgtgtactctttgagcagttcgagcagggttgcccgcttctcgacaaggctctgttgtgccgcttcagtatcggctgtccgcgcctggtggaatacgaagcgggtgagcgactcgaggcactcttcgacgagctgcgaccagcacagagagcgagaagtcagcatctgcctcgcttgaaatggtgcgctgacagaaaggacgcaccacggcctcctcctgatagccgaggttcccacggttggcgaggtcgagcaggagcgaccagcccgtcggagtgtcgccctcagtctcctccatcgcagcgaccgccggccggaacgagagcaataggccgatgcgcttgcacgccgcctcgagtgtcggaatctcgtcctcttcaaaggccgtagttgcaacggtccggtcgccgatgaggttacgcagcgtgccgaacagagcgtcctcgagctcgccgacctttgtcgcgttcgagttggcgagcgcctcggtctcgagcagatgccggatcgtcagcaaggccgcgttgaggacggcaaagtccgcattcttcaggtacgtctttgtcaagtcgtcccacagcgtctcgtaggcctgagtgcagaaggaagaagaggggagtaaggatgtcagcagagcattcacagatatttgacccacagcaacgcagacgcacagggatcatgcgcaggtcgaggtacgtctcgagttgcatcagccgcgggatcgcgagaatgtcggccagctgtgcggcctcgccctggtagcgcgtcagcaggcgtgggaaatgcttgatgagcgtccgcgtgaggtcggcagacgagctcgagtcctcgtcctcctaaaaggcggcgaaggagtcccacgtcagctcaggctttcacctcgaggtctgatttcgacgcaccttgtcggcctcctccttggccttgccgagcgcggcgagcaggatctggacgagcagcgcctcctcgtcctcttcgagcttccacgcccactcgatccgcttctcggcgtcctcatcagcctcatccgcagcgtcgtctccctccgtcgggcgcgagtggtcgaggccgagaaagtcgaccagctcggcccagtcgcgcaggtcggggacgtggtcccagagcgactcgaccgctgcagcgatccggccgcgcggcggggccgtcatcctcatgcggacggcctggctaaggcccttgagcgcttgcgaggccccctcatccgcgccgccggcggcctcgtcgagcgcctgcgagaagcggccgaccatcgccgcgagcgccttccaaccgaggcgcttgcgatcggcctcgccaacgccgtctgccgcggccgacttcttgcccttcttgccctttttggcgccgacgtcgagcgcctcgaccgcctcctccgtctcgtcggcccagaggcgttcgaagaagccggcgacggctttgcggacccggggctcgacctcgaatacgagcaagccgatctgcgaccgcttttcgtcgtcgagcatgccggccttgtcaatgtggccgaggacgccgatcgtcgttgtccggaccgagaggtcgacatcgtggaacgcaatctcgagcagccgcgtctggaagcgctgagtgaaggtcccgagcgccgcgaggtgcgtctcgttggcgtagagcgacgcgagcgcccggacggtttcgagccgggtcggcgcatggatgtcgtccagcatccagccgaggtacttgaagtactcgggctcgaggtaccggctcgggagcgtccgcatccagaggccgaggtgccggacgcactcagcccggatcttctcgtcgaggtcgcggtagcgcatgacaaagacgctgggcggaaggaggtgggagcggcggtcgtcagctcaaacgcacgcggacgggcaagccagagtcgcgaggagaccgacgtgttggaaaactcctggagatactcctcgagcttgctcttctgccagtggacgctcttcattgtccggtcgagctctttgatgcggtcctttccctcgcgcgagctcgcgcccgccttcttgcgctcgctctccttctgccggctgacgacgctcagcttctcgttgacgtccttgagcgcctcgaccaggccggtcatgacgtcaagcgcgatgacggtccccgtgtggcggaaggatcgcaggggcgagtgcgagagtgtgaacagccaggcctggaggacggccatcagcgccgaaggctcggtccgcttgttgggcacgcagtagagcgtgtccgagagcgagacgtggtggatgaacgtgtggacgaaggaggtgagcgcgccatggaacggcctgaaagtcttgtcgcgcgagacaagcgggtaggagccaagcgactcctatagtgaggaagagagtccgccaaaggtcagcgagtcagctggaagggtgaaagacaggtcatatcgtcgcacctccttctcgagatcgtcgacgaacgagggcacgccgtcgaggtcgaccgccttctccttttcgactgcggccgagctcccggaggcctgcatacagcgcgaggacgaaggatcagctcagcggatgcatggtcctagagcgagtccggcactcacgcggataaagaagacgacgagctcccagagggcctcgtcctcctcgtcctcgtacttttcggcccactcctcgacgatcagcccgagcgcagcattcgtgaagagcgcgtctgaggtaacttcacggtcagcagacgagtcgcgcctcagccaaaccagacaatgcgtcggtcagacgcactgaagaagatgttgtccttctcgatggcggccggctcaactgcggccttggtccgccggcccttcgagccacccgccgccgccgctgccgcggtccgcgccttctttggccggccctcaccctccgtctcggacccatcgagctcgctctcgtcctgcgccacctgctttgacttcttgcccgccgccgccgccggccgcttgcgcttggccgcgctgctcgacgtcgaggcccgagcgccggtgcgcttggggcccgtcggcgtgctgccttctgcgccgcccgacttgcgtccgccggtcgacttcttgcgcgagctcttgggcgcggcaaactcctcgcccgatgactgccaggagaggccgcgagtgagctaggatgtctgccaagagcgaacgcagcgcgtggaggagggtcggacgcacctcgtcagacgtcggctcctcctcatcgtcctcgtcgtccatcacaagcatgtcggcgtcctcgccctcgctgccgctcgaggcgccctttcgacccttcttgccgcttgtcgtctccttgccggcatcaacagctgcgaggcggaggatgcagcgaaacgggtgagccggctgacaggaggagtcgagcccacgacgacggcggcgcgtcgacctgggacgcacgctgagtggccgaccggcgtgggcgctggctccgacggacgggggccggcgagccctcgccgtccgagtgagcttcagccaggctagacatgctgctgttgggtgatttctgtctgtctgactctcgagactaaggtcgtgcgaaggagatcgatggtacagcaggagcgggggcgaggagaggagctcgcgacgcgttcacagccaaccttgcccgactgcatgccactcatttcgcacccgccctccactcctgcatcgctctgtcggaggcggctcgattctctcgcatgaggtacaggcgctagaaagtcatgatcgagggagaagcagaaatacaggtgacgcctagcacgtgtacttggactctccgggcagcgggacgtggtcctccatactgttaaaagacggcgggggagcgcagggtcgcagcgaagacagagtcagcatgcaaggttgcggatcgacagacgcagggtcgacagcaaccaggagagatgtaaaagacgtacgactcctcgccctcctgattgatcggcgacaataatgagatcataggctcggtcagcttcgctcatcatccaagaggaccgccactcgcggccgacccgcagcagcgagcggcttctctcgatcgacgctgctccccggacgcacctcaatctggccgtcgcgctcgacgacgagcttgggtccctcaaagatcttgttgacgacgctcgcccgcttaagaacctcgagctcggccagccgagcctcgtaccagctcgggagctcgggcgcggtcagcgccggcgcagcgtcaaatcgaagcgccgtgcgccggacaaagtctgcaaggccgacagcaggacagcgagtcggtcagcaccacggtcatcgagcgctctgtagatcggtgtgagcgactgacactgccggaagttgtacgaggcaaagcccttggcggcggcgtgcgtcgacttgcgcaaggcggcgagctgggcggccgtcggagcagacatcggaggcggaaagagggcggagtggcaggcaggcaggcgaagaagctgggacgagctaggcttgcgaaagaaagatctggctgttgagcaagtcgatgggctggcgaggacgaaggactgggttggtggtggagacgaacgaccgtcgagctgcggtcgacccgtttcgtcacgagccgccgacgaccacctcgatctcgtccagctgaccgtcgcaaagactgacgagctgctggtaactgacactgactggactcttgttgttcagagcatgcttggcgtcgtcgctcgacaggctggccgccggggaggctggccggcgctcgatctcgtcggaacctacgatggcgcgcctcctccctccagcaggctttaagttcttccttggatccgtgtcgtgcagcccgctctctcgcaggactttatgctagatataaaggccagcaggctgtccatctcttttgctgcctcccgccagccacctcccttcctcctttctacgtcctcggccaacgatgctcctctgcaccgctgccctcacgtgccttctcggcctcatcaccagcgccacctccaccaccggcgctcgtgtcccctctgatgtccttccgccctacacgctcaacaacgcagcgtccggtgctgccgctggccggcgtgcgctcgacgtacccatcccgcgctggtggtcacacgagacggacccgagcgcccagcgaccgaaagacatgccagggccggtggcatgcgccggcagccgactcgggcaggaggtcggtcctttaactcgagcgagagcttcttctcggtttgagactgacgttgagcatcgcccagctgcggcccgggccgaaccgtcccagaagcccgccgtctttgccaccggcttcgtcgccgtctttgacgctgtgaccgagacccagatcggctacattgccgcgggcttgacctctgcaggtgcgccagccttttaccaagtccagagtcaggctgcttcctactgaacgactttgcgactcggctcaggcgtctactatgtgacgagcgacaaggctctcgcgctgcaagtcacggcgtgaggccaacttcaccgaacgcgtctgatccgaaacgacgctgaccttttccggcccttacctgtcgcagtgagtcgggcggaagcaagaacttcgttacgctcaacggcccggatggtttcccgctcattggtacgctcttcgctcgctcatttcacccccgctcgagagcactgacactcttcgcgggacgatcaggcggtacactttggcggaaatgctgatctcaagatcggaacgaacaactactttctgctgactggaacaacgcagagtgtgtcccgagctgctctgcccgcctccaagcgccttggtgctgactcatccctattgtggtccacggcagctgcgcgcctttcgccaccggtcaccggccccaacacttgggtggacgaataccagatcgagtcgtcagtctggaactatgatccagccacgagcgtcatcacgatcgcctgggtcaatagcgacaatagtgcgtctttcctacgcggcctccagggtcttggccgaatgactgacctctgtctcttgcactgttaggccagccgcccgtcgagatcgtcacgggcgccaccgatatggctaatgagcgcggctacattgccggcaccagtccgtccgatcagacgtctactcgaagcaacgcagctgaccgataatctgtgcgcgcgctggttcaggcgacgctgccagtttcatcgccactttccccggcgacagcccggacatcagggtgagtgtcgggaccgtcaagaagagctcggctgtgaatgctgacttcaattccctcttgctgcagacgttcaacctcgtgccgtgagcaaagctggctccttttgcaacgatacccttccctcaagtttgcctctccctcctctttcgatgtatctcctctcgcaccgtgtaaagcctccgtcatctgccctcggtcggttcaagtctcgtcaatgtccatgcgtgcgcctctgcttgaccaccacctctgcaagccgtcttgcacaccgatgggcctcgaaagcggagacatcagatctcgagcgcgacccgtccatcaacgagatcgctcagctcctcctctggctgcttcatccgccggtcgagtacgaagtcggcgcagatctggcgaaagacggccgtgcgcgcggcaaaggtcgcgtcgtctgcgagaaggagagggaaggtgtcagcggcgagggcgcagactgttgggcgacagaagaatgacctggtgctgcgtcgaggtgaacgaatgtggaaggccggccgtcttcgatctgcggtgctcgcaggatgtgggcgagcagcgagcggaagagctcgctcctgcgagagcggcgagaatctcggtaagcccaaagccatatcaagcccaggccgatccaaaacgcactcatgcgcatccttgtggttgacgacagcatgcagctggtgaaagcagttggcgaccgttaattgagagccacgagatgcagagaggtaccgggacaaaccgaggtctgtaagaaggtcaaggcagccagcggaccattgctgccacaaagctcgatgaacctggggaaagttaggccacgggcatgttagctcagtccagcttcgatcgcggatggatgttgctcagcgtactgtcgctgccgcaacgccagtagaatccgtcgaacgacgtccttgaccttgggcctgcagaggcagacgagtgagacccgtcatcagcggcgggacattggtcaaacggtaggccgactcaccgctcgaccttgagctcccaacagtcgccgagtcggacctctgtgcccagaagcggcgtcgaagacgaggcagcacccgggttgccgcccatcagcaggtacgagttagacgcgggtgagtagaggaactgatgcgcgaagctgcatcgtcaacaggtttgagcggtcagcgatcacagacgcagacgatggagggtggattgactgaccgaggcgtcggccggatgctgcaaataggacgatgtcagcgttctgccgtttgcaagcagtctaaaagggccaccgggcaaccaaccttgtctcgccgtcgtcgtcgacgtccatcgcacctggctcgacggcactctcgtcgccgacctgctcctcgatcttctcccacttcttcaaggcgagactgaacgcccagagctcgcttttgacgatgccgctgatcgcgcctgttccgctaccgctcgtcgccgcgaccgcagcagacgagccgtcgagcgggaccgttgtagccgcctgaaccgaaggctccttcatcaggccgctcaggacgacaatctcgtcgcgcgaggggtcgaggaccgcccgctgggtaaaggccggcagcgggccgagccctgccttgctgtaatcggccgtcaggcggttgacgatcggcctttcgggatcgagcaacgagacggtccagaagtcggaaaggctggagggatgagtgtcggctatcagcggtgatccccttagcaggaaggcgtcgtcgggacgcactagcttggcgagcggaggccgccaaagatgtagatctcgcgcttagcggcgttccagagcatgctgtgaccggtgcgcgactggaggcccatgtggttgtcgccgctgccggtaggagtgagcgttcgacagcgtcagcaggcgcagctctgggtacgaagagcccgaacgatgacgcacaagagctccgcccactggcctcggcggatgtcgtagcggaacatgcccgagagctcgccggctgggtcggtgccaccgtagacgtagagggctcgccccacctcgtcgacgaccatctggtgatcgtagacgagacttggcccgcctttgctctgggagggcaaaaagagagcgtcagcttcaagcgatcagcagagagctcagcagcgggtgctcaccttgttgtcggcgcagacgagctcccaccggccccggccgccgtcggccgcaaagtcgaaccgccacaattcgttcttctcctgctcgagcgaagtcgagacgaccgatgactgctgatgttgcgcttggttcggcgtcgtcgtcggcgtcgttgaggctgctggggtgttaaggctatggtaggggatctcgtcgtagacgacaagcggccggacgccgaccggcgagtacgtcagggctacgtccggatgaggccgagtgaccggaggtgctggtgccggtgcagtgaccggctccggcgcggcgctactctcgactacagttggcggcgggtcgtcgacatagcggccgagcatccagcctgcactgccgcagacggtccacttgtggcacgaccgccgttcaggccagggctcccccacctcgcgctcgcgcgctacccagttctccgagccaacgtcccagtagtggaggtcggcgtgatcctcgcggccgtcaaaaccgccaaagacccaaaagcgctcgcctggcggatactcgaccatctggtgcccgccgcgcccttggccaaggctcggccggcgcgaccagcgcgacgtcttcttgccggctcggaggtaggcgtcaaagaggccagcgtcggcgaggtcgtgcaccgtcttctcagcggcctgccaggacggcgtccggggagcaacgaactgcgcgtggaggtccgacagcagcgggtgctcgagcgtgacgcccggagtcgaatctaggagtgcggggaagagcggattccgcgtccggcgaaggtgcgaaaggatggatcgcatggtcctcatcttgttcgcctaggagcagcactttagaccgttagccacccggtcgtcacccgcgcgactccgaacagacgtacccgcgtccattcgtcgagcaagcccgcgacgacgcgctcgtccgagtggccgaagagcgctacgtgcctgagcgacggcgagagggcgggtaatcagatcggaaagctctcactctcgaaagtctgggcgccgcaccagatcgagacgttgtagttggcaccctgcgcgctgttgacgggtgaggagcgagtcagtcgacagcctctcgagcagcagagccgacgaggatcagcgctcacgagattggcaggatcctgcaccaagacgagaggcggtcagcccagaggatcaagcaagggatctctctgcgagagcctcacttgacaaagcgcacgaccctcggcatcccgccagcctcgtcggtctctcgccaggcaatgtcgacccgctcggccttgggatcggcccggagcacgccttgccggacgggcttaagtgtctctagcgtcgagccggcaagcagggcaaactctttgagcgtgcaagggtgctctgtattgagaacaggcagaagaggaggtcgtcagccgggcaagcgaaagaaataggggcactcgcgtgcgcacaagagacccgccctgtcgagcaggaaggcgtcagggtgcgagacagaagccgagacttacgacgatggaacttgccaaagtgaacctggcggagaagggccggcttctcgagctcgagcacgatccacccgccaccgctgctgctggcggccggcgcgccggaggagctcgcaacagtggctgccgccgaggtcgtcgccgcggccggctggtagtgcccggcccagcgtgacgatggatcctgaggcgcgtcgacgaggatgttttgcgggtagtctacgagctcccgagcaaggtcagcgcatcgaactcaggccaggattgctgggtcaagacgcacacttgttggagacggacgagcagctgcgagagggaaggtcagggcggcggccatcgcggcgcggcgagaggcgagtcagcgagacattctcgaatcaccttgtaacagccatcgacgcacgagtggatcgtatagtcgagccggttaatttcgccaagctccatcgcgtgcttgcgagaatgagaagccgaggtggtcgaggtcgaggtcatagacggagctcgccgggctggcttgcgatggcccgcgcggcggagggagcgagcgacatgcgagcgaagctggtctcagcccttctgcctgttgaccacgacctcctttttctccgacagcagcatgccgaccctgctccgctccgtgctcagcgcgacgctcgtgctcgccgccgcctcgcgcgcactcgttcttcccggcgggtccggccagcaggccttctcgctcccggacgctggtcatctcatccacaacgccgccgacaaggccaccgacgtcctcaaggactcgtggaacatcgtccagggcgttgctcgggatgccgtctctggcaagcagtgtgcgtctctctgctgtcctcgatcttggcttgtcaagacgggaggctgacgatggatgcggctctcgacgacagggatgacgctcgaacacgactcgctccccaactacgtcctccgtgtgaccgagcccaagctctgcgacccggacgtccagcagtacagcggctacctcgatatcggcgaggacaagcacttcttcttttgttcgtgaaagccagcttgattgtcttgcggaggcgtcctagctgaccagccggtctcctccgatcgcctccctcctctcgcctccctcctctcgcctcgcagggttcttcgaggcccggcgcaaacctgccaaggctcccgtcgtgctctggctgaacggcggccctggctgctcgagcacgactggccttcgtccgtcccttgtctgcgcctgccgaagcgattgggctcgctgcgcggaacactcgcgctgacccactcctccacaccgcagtcttcgagaatggcccttgcaacatccgcgacaacggtacgacaaccgagctcaacccgttctcgtggaacgaggaggccaatgtaatctacctcgacagccccgtcggcgtcggcggctcatgggccgacaagtcaaccgtcaacagtgcgtccttgcctgcccgtacctggtgacaacgctcctgctgacgcccatcgtcgttccaaccctctctcagacacgccccaaacggcagaggacgtctttgccttcctcgccctcttcatggccaagttcaaaaagtacgcggccaacgaccttcacatctcgggcgagtcgtacggtgcggccctcctctcccgctccgcctcctctcagaaagcgacgacttgactgaccctttgtacctttgaattgaaagccgggacctatcttccgcatatcgcttcggtcatccaccgcgagtcgctcgccctggaggagctcggcgaggcagcccccctcccgcgcctccgcctggcgtccgtcctcatcggcaacggcctcagcgacccgcgcgtccagttcgggcacggcgtctacgactatgcgtgcgcctcgccacaagccgtctttgatccgtccgggcccgagtgcgccaacattgccgccaaggcgccccagtgcgcccgcctgatcgagtcgtgctacaagactggcagccgcttctcgtgcacacctgccgggctctactgctggtcgcagttgtacggcgacttccagaagctcggtcttgtacgtactctcagtagtgcaggatacacgcagagagccccactgactgaccgtatccggcccttttcttgctgcagaacccctacgacgtccgcaagaaggtgcgctctgacgtccgatgcgatgctcgggcttgactgaccttgtccttccctttcgaatgtcagtgcgacaaggagggcgaggatggaccgctctgctatcgagagatgggctggatcgagacctatctcaacaacccgaagatccaggtcgagctcggcatgcacggtgcgcaaggggctttatctgcctctgtggccatcgacggcgctgaccacctccagctcgcagagggcctcgagttcaagtcttgcaacatgcagatcaatcaggccttcctcctccaggtacgtcgcctttcgttttttgataaaatactgcgccgtcctggtctgacctttgctcttccgttcagggcgacggcatgcactacgcggccggcctcctgaccccgcttctggccgacggaattcggatcctcttctacgccggcgagcaggactttatgtgcaactacaagggcatcgagatgcttgttgatgagctcgacaatgtcttcaaggccgagtacaacgccgcgaaattttcgccctacgtcaccctcggcggcaccaagaaggagggactcgtcaaggtcgctggcgctcaaggcttcaccgccggcaacctcgcctttgtccgtgtacacgaggcgggccacatggttccctttgacaccccggcagtcgcgctcgacctgttcgctcgttggatgtcagtcgtacttgccctcttaccccgcttgccgcccccagctaactggacgacaatccctcgcagccacaacacgccgctcgtcctctccaagccagagaacgccacggtcaccgtctgacctcaaggtctcctcttccctctaccatctcatctccgtttggccccgttgcaagtcgccgaccgcaacttgatccatgttagcttttctcaccagcacgagcccctgttacgcaagaccctaaccaatctagatcttctgctcgccagggtcctgtttaacccttctacctcgacaaagggctgccctgccaaatactggtctttctagagaggagcaggatgcgtgctgccgccggcgtcgaatttgcgaggatcgcctgcggcgtcccagctgccgtctggcctgcggccgatcgcgcaggcgacgctcagcccagtcgggacaaacgtcacgttgtggccaagcgtgtggaggaaggcaaacgtctcgttcgtgaagctgagggagagagggcatcagtgcgcgggcaggaaatcgaatcaaggtgcggacgcaccctttgaagcctagcagaggcatgttctgctccatcgccagcacgggcgggtagatctggtcgtgcagcctcggagcggcgagcgcctcgagcgcgccgaaaccaaagtcgaccgtattgcggacgacctgggcgatcgcgctgatgatgcgcgagccaccggcggacgagactgagaggacgaagccaccggctgcgtcctcgacgatcgtcggcgacatgctcgacagagggcgcttacggcccttgactggaggcaggcaaggatcaggtttagtcacgaccgggctgtcaactgctcgacagggtctgggactgactgaagttgattgagctcggcacaaaaccgaacgcgttccgccggccctcgacgccaaagtcgtcgaggccgtcgttgaggacgatgccccagtcgggaaccatgatgcgtgagccccagtagagattgactgagcggcagcaggcacgatcagcagagacagcagaggcagcgacacgaccgacgccaaaaggacgcacccgtcgtcgtcagcgagatgacgagcccagacgagtcggccgccgtcatcgcgctcgtcccgcggtcgtcgaggacttcaaactgctccgggtcgtagtaggcaccgtcgtgcgtccgcttggtcgagatgagtgcgcgcgtgtgcgctgccgtcgagggcaagaggaactcgtgctgcgtcgtcgagacgttgggctcgaactctgccagctcggacgagggcaagcggggtcaggcgcatgacgagcaagagttgcacaagtcagcacgtacgaggatcgcccaagatcgtccgctggccgtagccgaacttcatgctctcgacaaagcgatggctcgccgcgtccttgcccgcgacgccagggatggtatagccggccatcgtattcaggatcgagaggacgatcgacccggacgatggcgcctgggtcgtgtagatcgtgtggttgcggtaagggatgctgagggccggccgcgagtggaccgggtagcctgcaaagcgatcatggccgtcagcggtcagcggcggccgctgagatgagcgacgcggtggccagcacgcactgctcaggtcctcaagttccatcacgccgccggcctttttgaccgctgcgacgatcgcctgcgccacctcgcccgtgtagaagccgtcggctcctcgctcggcgaccgtctcgagcgtccgagcgtatgtcggccgctggatgaggtcgccgaccgtcttcagctcgccgtccttcgcaaagacctcagcaaacagcgggtcctgcggccggcaaagagtcagcagagaggtgcaaccatctcttccaatgattgggtgactcacagtgatcaggaacgactcgttgtaggccggatccggccacggccaggcgttggccatgttgcgcagcttcggatcggccggcaggaggttcgtcggcgccttcgaccccggtttggttgcgttcataccctatactggcgaaagtagcaagtcagcagatgtcgacctacgtgcgataaagcagaggcaccgacgatgaacaggtcccggttgacttcgaagccctcgcgagcgagccgaatcgccggctggaagagctcgccccaagggagccgaccgtgcttccggtgaatggcctcgagccctcggagctcgcccgggacgagaacagagagcccgccgaccatcgtcgagatggtcgggtcggcggcgaagagggtcgcgttgatgttggcctgatgggaagggggaggatgacgcgtcagcccgaggcagcaacgaccggccgatgagcagaggcacgcacaggtgccgcgccacggaagtcaaccgactcgtacgagccatcgggcgaacggacgagtgcaaagccatcgccgcctgtgagggagcgacaagatggtcagggtcagtcaagctgcggtcagcagggtgtcggccagctccggccgtcgtagtcatcctccggtaacccgggcccaagagcagctccaacttctcagcgtcgcacgcaccgaagccagagtgataagatgcgatcgtcccgacacaagcggccatgccgacgagcgcatcggccgcgctgccgccatgggcgaggagcgacgtgccgatgtcggcgcactgctggacctcgcaggcggtcgcgcctgatagcggctcggccgcgggcgtcgggcccaagagccaattgagcgcctggagtaagagtgcaggcgcgaggacaaccatcttggtcggcgaatgttctagtgccgaatggaggcgggtcacagagaggcgagtcagggatgggaggcggttcaagggagttcggagggaacgaacgccgcggcgacgggctgacctcctcctcctcctgactcgcctctttttgacccaccaaccataaagagcctagagagagagtcggcaagcggtcggcagccacctatcaaccgacatggacaccacacgcacgacctttgagctcgccgaccggaccggcgtcgtcgttgaggccgacacgccgccgcgctcgcgctcgtcctcgccttcccggctgagcctcaacccaggcgcctcgctcgctccagtcgaccgcggcagggccgcctactttttcctagctgctgctaccatgaccgagatcctggtatgggtacgttctgccgtctgctttggcttgcatcggtcaagtacattgaggccaagggcgacgtcggagctgaccgccgacgtacgtctgttgctcgccccttcgcagggcatgccgttctcggtcggcatcctccacaactactggacctcgacgctcttcaaggacgagaacgccgagacagtcctctcgcttgcagcaacgctccaggtacgtctacagcctctctcagacgtgaggacgcccggcgacctccctccgagatgtgccgcgcagccgccctgcccgtgcctttcgtccctcgccgactgacccgatctccttttccagaccggcttcatgtacctccaggccatcttcgtgtccaccttctacaggacgtacccgcacacgctcaagtatatcctgatgttcggtacggcgatgggctccatcggcttgattggcagcgcgtttgcgacaaaggtgcgtcgacctcttgcactcgagcattcctgcgaggcgttagcacagaccctgacacggagtgctggcccgctctggcagccttttcaccttgtccttacgctcggcatttgctttccgttcgcttcagtaagtggctccgctctgactcgcctccctcaccctgaatcgcctccctcctcggcgtttagccgcgtagtgctgactcgctcgctctgcctctcgccggagaaaagtcgttgtatctaccaagtgccatcctgttgttcgactggtttgtcatcattttaatttagacctgtgatgtctgtcaaaaaagggcctgaccgaccttggctcgcgtcgacccacctgcaggttcagcgcgcggcgaggtaagtctacaacacttgaccttgaccagggtttagcactgacaatcgtctctttactcattcacaggaatggcctccgggatcatgtacgtctggtcgaatttggatgactctggttgtagtctgatcgcctcttttgcgctgcactcttgctttaggtatgccggtgcgtcgagagcttgcattcgcaactcccacccgcctccatcgctgacgagcctgaccttgcgagcgcgcgtaggcaccggtgtcggtgagtcctccttggatgatgatgtcctgtactcgctctctgacctacgtcccttgcggcaggcggcacggtcttccccttcttgatgcaagccctgctcaacgccttcagctacaaggcctccatgatctctctcgtcagtcgcgtcgttcaggccctctctcggtgcgctacttactgacatcccgacgcgtttggtcggccggcagggccttgcgtttgccatcctcggcggcgcttcaatccccttcatcaagcaccggacgcccgtctctaagttcagccgcaaggcgctgcacggccacggcgcgcaggaccggcgcaagatggacctgtcgttcttgcgccggagcacgttcgtctgcttttcgggctgcatcctcgtcacatccttctcgagctttttgccgtcgctctggctgccgacgtacagcgacgacgtcaattcgacgccaaacgggacggccttgctggcaatcatgaacggtgcgtctgggctcccgctgcagcccctgcaaggcgtcgcgaactgacgggcctcccttggctccctcctcccagcggccagcgtcccaggcctgctattcctaggttgggcgtctgatcgctatcccttgcgcgtcgtcctcggatttgtgagtctgcagcagcaaccggcctgaggtcccccttgttgactcttcgcgccgcccgctcacccgaccagtcgacctttggcgctgccgtgactgtcctgtttgcctggggctttgccggcacatcgagcgtcgccctcgtcgtatttgctgtcctctacggcttcctctcgctctctttccccggcgtctgggccgccatggtcagcatgatcgtcaggcgcgtcccctccccttgccttttttgtccccttcctctttttgtctccagctgacccggcccctcgccgtatcacagagatgacgccagtcttcctggcatcatcttttcccttttccacttttgcaggggcgtcgccaacctctgcagcggtccggtctcgtcggcgattctcctctcgcgcggtttacaaggcggaagtgttggttcgtggacccaacgtggcgagaacgcctggggagcattgctcgtctatacggtctcctgccttgtcgtcggcagttgcatcggtgtctcgtaccgccaggagaagaaggattgatgagccgtccttcggagttgcgggccgatggctgctgcgcgccggccgaagcgaaagccgcctggcgcccaacctcaaacgacgacgaccgcccgacgccccttcgacggcccttccttgtcatctaccttgtcataccgactacagcagctggctgtcgagagcgcctgtcaggactgtcagtaggaagacctgagctgacttggcctctcatcggacacaagagcgctcgtcgggcccgacagcccgccgtctgcgcccgtcatgacctccagacgagcgatcggcctctacggttgcggctgcccgtgacggatgggaccggccagtcttgagagcccggcggcggtcaaagagagaacggtcagcaggggaaaaaggaggttctctttcttcttgacgaccacctgcccctgctcccacttttcgcgccatgaacatcgagctgcagacgatccagccggtctcgccacctccaacggcgcggacaacctcgccctcgcccgaccgagcctcccgcagctcgctgcacctcaactcgcccttccccacggcccgctcggccgaccagacgacggtcagcatcccagagcccgacacgccgcaccggtcgaggtcgtcgtcgccggcgagtaggctctcgctcaatccaggcgcctcgctcgctccagtggaccgcggcagagccgccttctccttcctggccgctgcgaccgtcattgaaatgctcgtctggggactcgtgagtcgttttctcttgatctgaagagacgcgctatccaggacaactgctgactgcttgatctctgtacctgcctggcagcccttctcagtcggcattctccacagctactggacgaccgagctcttcaaggacgtcgagggcgccgaggcgacccttacgctggctgctacgcttcaggtgcgccttggctttcgcttgtgacattgtaattctcgcagtactgaccttgcctgctgtgttgtgttgcccttgcagactggtgcgcgcttccggctgcctctgtgcttctcgcgattgcgccacccatgctgacgccgcgcatttactacaggtttcctctatctctcggcgctcgtctttggcccgcttctccagcgcttccccaccaagcgggttcacctccaggcgtttggcttgctcgtcgccatggcgggcctcatcggctcagccttcgcgaccaagccaatgcacctcgtcgtcacgctcggcatcctcttcccattcagctgtctggcctacctcccttgtgctaccttgattttccaatggtttgccgagcggcgaggtgagtcccgctttcgtcttacggcgtttggctgtcgctgacccttctcatcgtcgtcatcgtcggcaggaattgcctctggcatcatgtaaggtcgctcggccggccaaactgccgctgaccttggctgaccattgtctctcccttctttctcgtctctctttctttcttccatgcgatcaggtacggcggcactggcgcgggcggaacggttttccgtgagttgcaggcccattcacaacatgttgggccactagctgacgccccgttctcgtcctcagccttcattgtctcggccctactcaagcgcttctcctataaggcctcaatgattgccctcggtctctgctggggtcttctcggcgccatcgccctctgcttcatcaagcctcggctccctgtcgtccgaaagacagccaaagcggcccacgcccggcggcgcttcgacggctcgttcctcaagcgttcgtcgttctgggctttcggcgcctgtatccttgcctcaagctgcggcaacttcctgccgtccgtcttcctgccgcagtacgcccatgagattgggtcaaaaccggacgggacgtcgctcatcgccatcatgaacggtacgtcgcgcgtacgacacactgtcgtctgaccgagacttgtgtgctgacgacctggattgtcgtctcccttcagcttcgagcgtgcctggtctcctgcttctcggctggctgacggaccggattccactccgaatcgtcatcctcgtctcgtgcctcggcgcggccctctcgtcagcctttctctggggcttcgcagagtcgaacgcgatgcttgtcgccttttcggtgacgtttggcttgtgagtggcgcgctcgcttgaggtgcatcctgactgcatgccggccgactaacgacgctttgcgctcttggaggactgccctcggcttcacctctgtctggacaaagctcatcactgtcgtctcgagtacgtcgccctcgctcccgctcccgcacctgccgtcctcctttttctgacgcccgacacccctcttccgcctgcagaggacgacccccgcctgccctcgctcctcttcgccctctacaccggcgcccgcggcgtcggctccatcacctctggcccaatcgcgtcggccctgctcgccgcgccgagctttgacggcgcaaagggcgcgtatggccgcgactacgggccgttgctcgtctactcgagctgcgcgatggcggttggcgcggtcgctgggtgtctttaccgcgagtgaggttcctctgtcaggcctcctcccacaaaacgctccgtcaaggggcgagactctcattctgtacttgttcctggcgacgagcatgcttcctgaagtttcaccggctcaggtagcgccaggctgaatgtaaggccgcagacatgcgattcggcgcgggggagcgcgggcagagcgctccgagaagccgcacactgcagtcccttccggttggcgggcgggcgatgatgggagacagggcgcagctggccggcttgacttgagactcgtcaaagatagggtttggacgtttgttgacgttcggtcggggacgagcgctcttcttaaagcggagatgcggggcgcgcgctcttctggaagggcggtctttgtcaagactttcaatgcgtctagaagaagaaagtcgtcaattgtctgacatcaagctgcagttggatgagcatcctgagtacgcactgacctctagaggctcaggcgatgacgacttgatgggaacgctggacgcggagagagagcaacccggtgaagctcacgagtcgctccgtgacttggcctccttctcctccttctcggccgaagcctgaccggcctcctccgacggctcaatctcgccttcgaggccctcgatacgcgcaagcagccggtcgaggttgccctcgaggctgccggccgctttctcggcttgctccagcgtggcgagctcggcgaggagggcggcctcgtccgcctgctcgtcgtcgtcgtcgtcggccgcctcgccatcttcgctgtcgacgtcctcgaatgagccgcagtcgtcgtcatcgtccccaccggcgctatcttgcgaggcgagcgcggcgacgtcctcgggcgagagatcgaggagcttcatgagcggcccgagcagggcgaggtccgacgccgtcagggccgagaggtcgacgccggcgagctcggccgggaccgctgccggcgccttgctgttcttgactgcttctgctgccgccgccggtggctggacgagtgcgaggaggtcgtccatttcggagggcatcgtggtcgtgtcgagacgggctggctggctgtcgtgcgctaagtcgtcggagaggcggttgggtgtttacttccgaatcagagttcggaggcagaaagtcatcgactgcgcgggcggcgcgggctgctgacaacgctgcccctcctcctcgcctcctctctctcctctgactatcatcctccagacagccatggcaccctcttttcggtcaatcgaggccagcctcctcctctcttcatcacttcccgactcgctcgaggagccatccgcccatgccgagctcacgaggctcgtcctcgacgcagagtttgagcaggcgctcagtcatccgctcgcgaaggacgtcctccagctcgggccggtcgagcagggcaagacggatgccgagggggcgctggccgagctcgatgtcgctgcacgactcctgcctctggccgacggagcgagcgaggaggtcgagctcgcacgcctgctcgtcgccgtcgcgctcctgcaggcgttcgtccaggtcaactacaccggcccggcccttcctctgtcactctccgccctcgctctcttctcagcggagaccttcacggaagaggtaacggcggcagacattgatcagctctcgattgagcgcctctcgttcctcggcgagccggcctatcacctcgcggccctgccgtcgttcctccagctcgcggtcgcgcttctttcgccggccggcggatggaaggccgttgagtcgggcgcgtggtgggcgctccgggccgagcgtgtctggcacaggttgttgatgaccgactcgccgctccctctgcgcgaaggcgtgcttgaggcggccgaggcgctgctcgaggcgccgttcctcgacctgagcgaggccacctcgccggccgtccgctcgtcgacgcaggacctccgggcggcgctcgcggtcgaggtcgggctttcgaagcacctcttactcggcgagaataagccggcgcttgcggcgttcgagcgggcaaccgaggagagcgagcttcgctacgagttgacgggcgcgctcggcaagcggacaaagtggcagcagaaggaggcctcgcagctcgttgtccttgccaagtcgcgcgagcggcctggatggacgcccgtcattacaaacgcgccggagcgggcggtccaggaggacggcactaaggcgaccgtcgaccagaacgggatccctgagacgctccgcctgaacgacgacacgctgctcgagcagacggcctacacagctctcccgccgcatgccgacacggcggccgattcgctcctccacgagattgacccgagggatccgccagtcctccacccgctcgatcaggcgctcatcctcgccctcccgctcgtccatcactcggcccacgcagccgcctcgtccgagctctcgatctcgcagctcgcaccctacacggccctcgtcctgacgcatgcccagaactggtcgatacacacttacggcctccttcttcgctcgcgggccgaggccggccggacgaggacggtcgagcggagcgtgatgcagctccaggcgctcgtcgaccagatgccgctcaacgactcggcgacctcacccgggatcgcgtctgtcaaagagcggctccggtacctctggcagattgacctcccgagcaagtgggagctcgaggctgagctcgctgagcggctcgtcagcctcggcgtcttccggagtgcagaggagatctaccgccggctcgaaatgtgggatatggtcgtccgctgttaccaagtcagtctgacctcgcgaagtgttctgagagaagccgtggctgaccgctgttctgtttctgccggccgttgcagcacctcgaagagcaggatcgggcaatcgagattgtcacctcgctcctcgccggcaagctgaccgaggcgacgcagacagtcgaaaacatgcgccggggcgaggccgcccggtccgagaagaccaaggtccggatgagcgtcgcgcgcagggcaaatctgctgtgcatgctcggcgacatgacagaagacacaggtaacgagggcggcaagcgggcgaagtacgagcaggcctgggagggtgcgtctgccgcctgagcttcgacggatcatgatctggacggctgatcctttgctcttcgactcgaatcgccagagtcgaagcacacctcgtcgcgcgccgcccgttcgctcgccggctaccactttgcccgtgacaattacgccgccgccatcccctttttcgagtcggccctctcaatcaacccgctctttgcgcgatcgtggttcatcctcggctgcgcgtacgtcaagcaggagagctggccggatgccgtccgcgctttcaggcggtgcacgaacatcgaggaggaggacgccgaggcgtggaacaaccttgcgagctgctacctgcggatgccggacgttggaggcatcgtgcgtctcgtccgtgtagttctctgcttcgcgccttgctgacgatacccttttaacacgtaggacggcctgaagaaggtcgccgctggcatcgatctcgatgacgaggcggtcgaggagaaagaggaggaggtcaagaaggtgcagccagctttttgtccccgttccagtgctccctatgagtttccaatttgacccgcttccgtgccggcctcagcccgacgagggccgtatcccgcacgccaacaaaatgctcgccttccgggcgcttcaaattggcctcaagtactcgttccaaaactggcggatgtggtccaactacgccatggtcggcgtcgacctcggcgaaaacaccgaggcctgccgggcgctgacgcgcgtcgtcgaggagcgggccgacgtcgacggcgagggctgcatagacattgaggtgctcgaccggcttgttgccagcgtcacgcgggcgccgtcgcccggttcagccgaggagcgggcgctcgaggagcagcacgagcaggacggcgtccagattgcctttacctcgaaccacggcaaggggctcgagacgtacgtgacgcggctcattgagcagacaatcctcccgcgcatctcgtcctcggcacggatctacaaggcgcacgcgaagctcctgctctggcgcgggcgggtcgccgacgcgctcgacgcgcacgtcaaggcctacagggcctcggtcgtcaacgacgatgaggtcgagcgcgagcgcgtccgctggcgcgaggccgtcgaggaggtccaggaggtcgtcgatatgctcgtcgggctcggcccgcgggcggtcgacgacgagcaagcccggctcatggcggcttcgccgaccgagggccaggagacaaagctcgtctggaaggactggaagttccaggcccggagcatcgtccgctccttcatgggtgcgtcctacgcctgttcgcttgcaccgtctcgggtgtgtggctgtcgactaaccgtctgtctttccgcgcgcataggccggacgaaggactctttcgaggacgagcccgagtgggaccggttgaaagaggcgcttgacgagatcaagaatgcatgatcctttgagcgtctctctacatgcagaaatttgaggtcgatgtgcaacctgtcgtctcagagtctcgtacgcattggcatcgaccggtcccggcggaggccgaggggcgccgccgctgcggcagagtcgaaacgagctgcaagaccttgcagccgcccgtcggcgaccgtcttccacgtcgacaactcttggactctacacagacgccctctcgagagtggccctgctcatctgcacactagttcgtcgtcgccttttcgctgcctagctttgcgtcagcgtcatggtcgccgctgctgccgccgccaccgtcgcccgcgaggccatcgagctcgccctcccagccgcctcgctcgcctgtctcgccggctcgttcctcatcacccggacaagcacccaccacacgccgcgccggacgccgatcctcctacttgaaggcttgcttagcgcgagctatctcgccagcgggctcgcgactttgatccaggtcgtcctcgaccggcgctgggcggccggcgcgccgttcgccttcgcctatgcgcttggctcgctcgtcctttggggcggcgtcgcgagcacgtccgagtggaagcacgagtgggacaagtggtgggtgaaggctgtcgtcggcctcgggctcgttggcgagggcatgctcctcgccctccagatcaagaccgtcgctcgcgtgcacgcgagcccctttgagctggcgtcgctcagcctgttcgctacgcgactcttgcttctcagcccgctcgccgccctcctcgccttccctcggccggcttccaacggcaagagctcgtcggcttcggcaccgctcctgtcgtcgaccgcgaacggccatgctgaggcgtacggcacgttccctcaatcgaccgtcccgtccgccgcaccctcgacgccagcgacggccgacctggctgagccggccaagaaggccgacgaggctgcccagtcgtggggcggcttctttaaacgcctgtacgacctcggcttgatagaccgactctggccaaaggagagctttaggcttcagctcttctgcgtcctctgcgtcggcatcgtcctcatcacccgtggcgtcaacgcgttcgccccgctcagcctcgggcacgccatcgacgctctcacctctggagaacgttcgtccaccgtcgtgtctggcctcttttcgccgcgccgaggctgacagagtcgttctgcctcagcgccctggctctggatctcggcttacgtcctcgcccgcttcctcagcggctcaggcggtctctcggcccttcagaacgttacctggacgcccgtcgagcagtatagcgacgcaaagatgcagacgctctgctttgaccacctgctcgacctctcgctcgcttggcagacgaaacgcaagacgggcgagacgatgcggacgctcgaccgcggctacgccctcacaaacctccttcaggtgcgatgccacgtcgcccgccatcagcgagcagatgtctgacctgcacgctggccgtccctgcgcagatcgtcctcttcaagttcgttgccgttctcgatttgccatccgcattcggccggtccgattagctgacattgaagtcatcccctcgtaactccagcatcacgccgatcatcctcgacatcagcatcgctctcatcgtcttttgtacgtctggtgcccctcgtcttccaggtccgctctgactcccctttcttccgatcacagtcaagctcttcggaccggcgctggctgtgcgtccagaccggctcggccctatcgcttcctacgatagccgctgatgctcaactttgatatcaggtcgtcgtctgcgtcgtgatggtctcctacgtaacggtctctgtcctcctcacgacctatcggacgcagctccggcggcagatgaacgagcgcgacagcgcgatccgggcgatcttgaccgacaccctgatgagctacgagacgggtgcgttgaccctcaactgtcttcgacattggagctagactgaccttgtcttgatccactgcagtcaagtacttcacggccgagaagcgggagagcacacgctaccgccaggccgtcgacgagtaccagcgaagcgaggtgcgtcacactgcagttgcccctcaacctggtcgcacggctcatcctgcttctcttctcccctcgctcttacagtacaaggttacaagtgagtgcgccgccgttggacaccgcttgctggcacctcagactcatctgacgaccttcacttcaaaccctctccagtgtccctgagcttgctgaactttgtccaggcgagcatcatgtccctcggtctgctcgtaggctcggctctcgtcgccagcgacgtcgtcaagggtcgcatctcgccatcagccttcatcgtcttcaactcgtacctcgcccagctgtacgggccgctaggctggctcggcggtctctaccgccagctgaaccagctgatggtcgactcggagaagctgctcaagctcctaagcgaggaggttgaggtcaaggaccccgagggcgctaccgagctcgtcgtctcggacggcgaaatcgtctttgacgacgtccacttttcatacgacgaccgccggccggcgctgagcggcatcagctttacggtccccaagggtcacaaggtcggtctcgtcggtgagactggcagtggcaaatcgacgatccttcggctcctctaccgcttctacaaccttcagtctggcgagatcaggtacggtcggcttttcgctctaatcggatcgctcgctgatgttctgcgcttcggtcgccggccgcaggatcgacggccaagacatttcgaaggtcactcagctttcccttcggcgcaacattggcgtcgtgccgcaggataccgcactgttgaacgagagcatagggtaagtcgcttttctgacgctcttactgatctcctgctgatactcgctgctgactgcatcttgcaggtacaacattgggtgcgcatacggcacggctgcccgactgactcgaggcgtccctctgctgactaacgacccgcccgaaccctcgcagctacggcaaggagggcgcgacgcaggaagaaatcgaggcggcggccaaggcggctcaattccacacgcggatcgagagcttccccgacggctacgagaccaaggtcggcgagcgcggcgtccggctctcgggtggcgagaagcagcgtgtctcgctggctcgagcgatgctcaaggcctcaccaataatgatcctgtgcgtccgctcggcgggcgttttgacctccccggaatcggcgctgacgggccgccttcctctgggtctacagcgacgaagcgacgtctgcgctagacacgcacactgaacgtgaaattcaggccgcgctcgttcagctgcaacagggtcggacttcgatcagcatcgcacaccggtgagctcagccccacttggcaggcaggtgcgaggcctccgctgaccactctcttgccgcccagactatcgaccatcgttcactgcgacaccctcatcgtgctcggcgagggtaagatcatcgagcagggaacgttcgacggtgagtcgcgcccggtgccatgccgcttcgaacgctggccgactgacccttaatctttaccactcggcagagctcctcgctcgcaagggcgcgttcgcaaagctttggcaaaagcagatctcgagcgaggttgagcttgcggcgatggcggagggcgagcagcccgaacagaaggagtagtccgcagggcgcatgcggggcgtatagatgcctccccattccacacgtcgtctcggccgtcacaggcgtagtctcagccgtctaatgcgtcttcccggctgagcgtgcgcttctaagccacacggagcgaacggagaaagcgtgaatgcgcatgacagatcagtccctcgaacggacacctgttccgccctaagccgccgccggcgtcgtcgactggacggcagccgcattggcgtctccatcgaccggcacgagaccctcctccatcttgccgcggatcgcccagaggccaaagttggtcttgacgaggacgcgcgggtcgaagctgcaagcggcaggagcggcccggggtcagcgtcggaccgaggcgatacggtcgtgacgaccactaagggccacgtactctgcgacttcccacttttctgaagcaaaggcattctcccccggtgtaatgagccagtcgaagcgaccatcgacatcctcgagaccctctgatggcgggaaagggggtgaggaggcgagaaaggagggtcggaacggcggcggcgcgatgtgaggcggcaatgtcgatagatggcgatgtcgtgcgtgacgatgagcgagaggtgggcgaatggatgatggatgtgtaatcgtgttgggttgggaggagggaggaagaggagggagcgaggggcggtcagcacttggtcgcggagggcgcggcgaaaaaaaaaggggccgacgcacctagcgcctggacgtcacgctcgacgtcttttggcgagaagccggtgacaaagagcgggcactttgtctcgaggacgagcggaagcgtctcgccccactctgcgtcgcggttgacttggagctggccgggggcaatgctcgacgggaagccgaaaccagggctgcacaacgggcaagcgcgagcatcagtcagcgtacgaccggcgcgcacacgagggagagtgagaggaacggcacctgaaagcaaagaaggcgtccgagtaggggtcgaacgggccaaactggtcgtgaatgtgctcgtatggcgcctggatcgacgtcagcgtgatctcctttgagaccgggatcgtaaaggccggcacgccataggcgtccgactcgtcccgtccggccggggcgaactcgctcgagcgcgtgacgctcatcgtcggcgtcggtgggacgtagaatgtcgggccgtaggcgccctcgaccgacgagagggtcgagaggtcgacgttggccgggaggggcgcgaacgagcgcgcctcttcaaaggccgtgtaggggtaattcttgcggtccggcgaggaggtgggcaggtggtcgagcgagcggtgcgcctgcttagcgggcgtcgaggacgaggtggccgaagcgggtacgttggatgcaggtgcctttgacgagggcaacggaccggctgctgcgctcggcttcgaggctgcgggagctgttgatgaagtggacttggtcgccggcttcggcgtcgcagcaggcgccgcagtattcggtgccggatccgcctcctgcccggcggccccctgcccagccggctcctccttcgcccgcatctcaccgacgtttccatcgtcgtcgttcgagtcaaacacttccctcggcgtccagttccgtgggagagccgcctgcgggccgataaagtaaaccttgagctgggcctttgggaacatgcgcgagagctgctcccagttggtcggcgggagagacgactctgcgcgcgcgccgaggacaaagatccggacgaccgagttgaggcctgggacgggcttcggggtccgttcgggattgagcgtcgagcggatagctggagatcgggcagggagatgtgagcaaggagggcgtcagcgtcgctcaaaaggaggccgcgagcgggcgggccgcaccgtcgagcgagcgcttgccctcgattgtcagccggccgctcgaccgggtgtatggcgagaagtgcgtaaagacgctcgccatcgtgacggggaaggtgaggaccttggtcatgtgccggtagacgcggaggttgtcgagcgacggaaagttgctgcgcgcgacggagaaggcaggggaagacgagggtcaggaacggcaacgagaagggtgcgacgcacctcttgctcggacccgtatcttctacacttaccgagtgtaaaagaacgtatcccaattggtgaagttgacgatcgagtcgtacggctggtagcctacaggagggccagttccgcacacgggagagaagcaaggccggcggtcagcgaggagctgacgtgctgcgctcgacaaggacctggcgacgtaccaggcaggttctcaaactcgacgagcgcccggccggaccggaggtcgtgctcgtcctcgtttgcctcgcgcagccggtcgacatacttgtggtggtcgtcgtcggccttccagtgctcctcggagcagtgcgtcggccagccggcatcgggcgagtcaaactggacgaggttgcgctcgccgaaatgctcgaggcaaaccgggcagggcgccatgcgcttgatgcgctcagcccggagccggaggtcctcgaacggtgaggtcgagagcgggtggaagaggttgtcctgggcgagcagctcgcgcggctggggtgcgtccggcgacggctcgggcggcgccgagggcttgtactcgtcctcttcctcgggtgacttgttgccgccgccgagcatgccagagagaaacggccggcgttgcggctgcagctgcaactgctgaagccggtagtaagacggagcaagcgaaggtgtccgagtcgaagccaagacaagcggcgcaggcgccaggcggcgtccaaaagccgaggccgtggcgccgagagcagaccggcgtgcgagcatgctggcgagctgtaagactgagatgatcggtcttgtctaggttgtctgctggcttgctgtcgaaggtcgggagcacgggagggtcgatcggagttggctcgagcgggcgatgcatcaagacaggcttcccccggcccatctgagcctcgggaacgccctcgacctagccctccgaccatacccctcaagcccgccatgtcttcaccgcgctcgtccggcgacgaagacgacgacacaaagtacgatgataccaaggaggaggaggtcaagcccgacgtgcttgccgcgctcgagcagacgccggccgggccgtcgagctccttctcgccgccgccggccgctcggtcgaagcagacagtcagtccaggtcgagctcgctacactgcccttcgaagggtgaagactgtgctggcggaggcactgtcgaccgggtgctcggagcaagagttcttgtcaagctcggcccgctgacctccgcctgctcctcttcgcgccggacccaggacctcgaggcgatgaacgactcggacaacgacgagccggacgaggacgacgaagacgaggaggacgcggacgaggaggaagatgaggacgaggaagaggctcagagtcggaagagggtgcgttttgttctctctggcagctcaaccgcttctccttccttcattgctcctccgtccgagctcctgtcgaccgcgagccgcgcgtctaggaggtgggcaggagctagcaagagcgacgccggctgaccatcgcgcgatcaccttccaggcaaagaagcgcaagacaaacaggaaccggaaccgcttcattgaggatgaggctgaggtcgacgacgaggatgaagacctcgacgaggaggacgaggactatgtccgcgagagtgcgtcggcccgtctcgagcgagctttcgaccgccttcgctgctgacgccttaccacttcatcagccgaggagttcatcgaccaggacgccgcgctcgaagctgacggcgcgctcgaccctcgccgcgtcgagcgcgaccaccagcggctcgaccggcgccggcgcgagtacgacgacctcgacgccgagcggatcgcggccgagtttcgcgagcggcacaagaaccagcaggctcgggcgtacagcggcgacgacgagaacctgccgcagagcatgctcgtgccgtccgtcgaggacccgaagttgtggcagatccgggcgaaggtgcggcccagtgcacgctggctggcgtctcttgcgcctgtgtactgaccacgaccgcctgcttgcagcccggccgcgagaagcagctcatcttctcgatcatgcgcaagtcgcttgatctcgagtacaccgacaagccgctcgagatctactctgccttccagcgcgactcgctgccggggctcatctatgtcgaggcccgaaaccggtcggcggtcgagtcggccgtccagggcctcgtcggcgtctacgtctcgcgcgggatcaacctcgtcccgatcgacgagatggcgagcctgctcaagctgaccaagaagcgggtcgagatcctgcccggctcgtttgtccgcatccgacgcggaaagtaccagggcgacctggcccaggtgctcgacatcaccgagaatggcgaggaggtcggcctcaaatttgtccctcggatcgacctccggccgaacgaggacccggcgaatgccaacggcggcaagcgcaagaaggggacgatgacgggcaacctcgtcggccggccgcacgccaagttcttccggtccgaagaggtcagcaagtcgtatggcgcccgggcgatcgtcaagcgcggcgaccagtttgtcttccagggcgacacgtacgtcaacggctttatcgagaaggacctcaaggtgacgcagatcgacaccgagggcgtcattccgacgatggacgagctcgaaatcttctctggctcgaccgacgccggcggcggctcgaccgccgaggactacacaaagatgcaggagcaggccaagcagactgcgattgccgtcctccagccgggcgacgtcgtcgaggtcacgcacgaccagaacaagggcgcggtcggcaccgtcgtcaccatctcggagggcatcgtcacgatccgccggacatctggagagaacgccggcgccgagctcaccgtccggggcgagtttgtcaagaagctttttaggcagggcgagcacgtcaaggtcattacgggcaagaacctcgacgagaccggactcgtcctcaaggtcgagggtgatgtcgtcacgctcatgagcgacctctcgaaacaggaggtcactgcatttgcaaaggaccttcgggtcgcctccgaggttggctcgggtctcaacgccgtcggccagcacgaactgcacgacctcatcagcttcgggtccgtccttgcgctccattcgaccttgtcgctcgggctgacctctcgttctttgctcctttaggagcgagtttggcgtcatataccggaccgagcgcaacctgttccacgtgctcacgctctcaggcaagacgtatcaggtcaagcccgaccaagcgaggagtgccaactcgaatcgcgacacttcggcctacgacctgaatggtcaggcaattcacaagggcgagacggtcgtcgaggcctcgggcgaggtaagctgccttcttgcgccttgacggctcgacgatcgctaattgtcgcttcttgccttttcgtagaatcgctccggcgtcgtcattgcgatccgcggcctctttgtgttcctctacagccgcgacatctcaacccagaacacgtcggcccacgagggcgtctttgtcgtcaacccacggacgctcatctctgccgcatccaagacggcccggatccagaccgacctgacaaagctcaacccggacatcagccagcacgtcccgatgggctcgggggtcgcactccagggccgcaagttccgcgacccgctccaggacatggcggtcgtcatcgttaagggcatcaacaaatcgcgcgtcggcctgatcaaggacgtcaatggcgaggtctgccgggtcgagctccagtcgtcaaaccagacggtcaccgtcaacaagagtgcactcaagcgaaaagagtgcgtcctttcctgtcgtgcgctgcctctaacggtaatgctaacgcgttcctctgtgattgccagcccgcgcaccggtgcaatctctgagctgccttcatcggcggtaccgatgagcggcgtcccttaccggcggccagcgtccgaaggcccgatgggacctccagggaccgtcaacccgtacgccagcttggcgggcgcgacgcccaacccgtatgccggcgacggcggccggacacccgcctttgccgccggcaggacgccgaacccttacggcggtgcgacgccgagcggcggcgcttggggctttggtggtgcaacgcctgcgccgggtggcgctggagggcggacgccggcgtacaacatcgtccagggcggtcggacgccggcgatgggcatccagggcggccggacgccggcgcctgttgctggcggtcggactccctatggcggcgggttcaacggcggtcggacaccggcttacggcgccggggcggccgcgggtgggaggacgccagcgtatggcggcgtcatggctggcgggcggacgccggcctacagcggaggctacggcggcgagcagccgagctacagcggcggcgggggtcagggctcggcgagcgcggcgacgccctatggcgcaggcagctcggcctaccaggacgggccgtcgaagtcggcctggaacgcgccgagcaaccagaactacggcgtacgtcctcgctactgcctctccttctgctcgttctttgctgaatctcctcttgtcaccactgcagaacgcctgggactcagcaccgacgcccggcgccggccttcaatcggcaccgacgccaggcatttacggctcggcaccgacgccaggtccgacgcctggcgcgccctactctgcgccgacgccgcatggcgagccctactccgcaccaacgcccggcgcaggcccttactcggctccgacgccggcagcaggcggctggagcaattagggaagagacggccggagggagggacggcgcgagggccgacggacctgtttgtacgagtagagctttggacggaggggggagggagacgattcacatgcgtcgctctctgccaaaacccgcgcgcacgctgtcctgaccttgccaagctgaccccgactcgtatgctcgatgagcttgcagcagagggccaaggtaggtgcggcagcaggcacctgtcaggacgtcgctccgcgtcgcatgctcgccccctttcctcgccgcgccgccgaccatttccctctccctgaccgccatcgctctgcacctcctctactcgtcccgacatgatggactcgccacgctaccggctcgaaggctcgcctctcggcggctacgagctcgacgcggccgcgctcgacgagaaggccgaggagctcgacaaggagaactctggctgggaggacagcgacaaagacaacgacaaggacgacccgaatgaccggctcgacttactccagcagcagctcgagcagcatcagcagcagcagcagcagccggcagaccatagcgaaggaggcggcggcatgtactcgttgccggcggcgatgacgcccggcagcgttctgctcggcgcgcttgtccgcgaggacggcagcggcgcaggcgacgagaacgaggaccacgacgagccgtcccagctcaatgttcaggtgcgtcgagcagctttatcgacgcatctgctcgagctgacgatttgacgagctcggtcggaccagtcgctcttcccgcagacgtgggacggtcttcatgcccagccgccgagcccggccggcgaatgcggtccaacctctctcgcagagaccacaccagcggtcattccacacaatttgcctcgctatgcctcggcgcgaacaccacctatgccctcgatggtggacctcgcacctccggccactcccgtcgtgagttgcgcatcgcatcgaggttgagtgggtctcgcgctgactcgaaaaggggtttgtgcctgcctacagtaccgtcggccgccgacgccgctctctctcaatcgctttgccatgaagaaagacgagatggacaagaaggacgaggacaaggacaagaacgaagacaaggcggaggacgaggacatgggcgtcatctcgtcacctccgccgccgccgccggcccagtcaccgccaccacctcagcagcggtcaccacttcccccttctcctccggctcctacgactcctgcccgtctctcgcctcagatcatgccgccgaactctggatcctcctcaggctcctcgctggcgagctatcagtttggccggcggcccgctcgaggcgggagccctgagcctgcgcgcacgacgcacgcggtcaagcggccgatggccaggccgccgacccggccagtcccagagccggtacctgagccgatgtcggttgacgacaagaatgaggaggacaaggacgaggaggatgaggacgaggaggatgaggacggcgaagaggacgacgactcaggagaagaagaggctgacgatacccgggtagcaggccgccgtcaggttcgtcctcaaccttgccgtcctgtcaaggtcgcctgctgatctgtgtgcgccccttttcgcgaccttcaggccaaacgccgccgcccgaacaaggcgcgcaatcgcttcatcgaggacgaggctgaggttgacgatgacgacgaggaccttgacgaagaggacgccgagtacgcccgcgagggtgagtccctcaagcgacagacatcaatctaccttggagcatgctgaccgaccgactgaacgcttccggccagcccaagagcttattgccgacggtgaagatgatggcaacgggccggaccggaccagccgcaaccatcagcggctcgaccggcgccggcgcgaggtcgacgaccgggacgccgagcgcattgcggccgacctcaaggcgcgccatcagcagcagcaggtccaggcgtacagcggcgacaacgagaacctgccgcagagcctgctcgttccgtcggtcgaggacccaaagctttggcaggtccgcgtcaaagtgcgtcccttatgccctgcttgtgagggcattgaatggacctgatcccgctttccctctcacagcccaagtgcgagcgtcaactcgtctactcgatcatgcgcaaggtgctcgacctcgagaacgagggtgggccagcgccgagaatctactcggccttcacgcgcgacacgctgagcggcctgctctacgtcgaggccgacacgcggtctgcggtcgaagaggtcctcgacaacctccttggcgtctacctcctcaagggcatccagctcgtcccggtcgacgatatgccggacctgctcaagctgacgaaggagcgggtcgagctcaagccaaactcgtgggttcggatcaagcgcggccgctaccggggcgacctcgccaaagtcctcaaggtctcggacaacggcgagaccgtcacttgcaagttcattcctcgcatcaacctctcgcccgccgacgacgagcgtgacgacggcggcaaaaagaagaaacgcaaggcggccgcgctcaccggcaaggcggcgactcggccgccggccaagctgttctctgccgaagagatcatcaaggcctacagcaagcgggctgtatcaaagaagggcgactttgtcatcttccaggacgacgtctacgccgaaggcttcctcgaaaaggcgctcaagatttcgacgctcgaggccgagggcgtcatcccgacgatggaggagcttgagatctttgccggcccggcctcgacggacaaggacgacgaggtgcctgaggaagactactccgcgcttcagccgcaagcccggctcgcctcggtctcggcgctccaaacgggcgacattgtcgaggtcacccaagaccagaacaaggccgcgatcggcttggtcgtcggcatcgctcacggcgtcgtcaccctccgccggatgacgggcgaggccgccggcacagagctcaccgtccggggcgagtttatccgcaagaagttccgccagggtgaacacgttaaggtcgtcgctggcaagaaccttgacgagactggcctggtgctcggggtcgagggcgacgtcgtcaggttccttgccgacctctcacgcgaggaggtgcggtcgccggtagctttgtctgcgctaaagcagatcgcttgctgaccacgtctctcaactggcaggtcaccgcctttgcgaaggacatccgggtcaccgaggaggtcggcagcggtctcaacgcgatcggccagtacgccgtccacgacctcgtcactctcgagtgcgtttctgctggccgcctccccgtctacaacgccagccactgatgatgatcgcttgcctcaaatagcgaaggcaagacgatcggcgtcatcatccggatcgagcgccagcggatcgacgtactcgacactcgcggtggactgcactcaatctcgcccgcccgaattaccagcactgtcgtcaacaccagctcggtaaccttgtacgaccaggacggcgaggttgtccgcgagggcgatgccgtcgtcgagacacaggacgaggtcagtcaagactcagtctaatctatcaaacggcgggcgtctgaccttcatctctgcacgtgcctgcagcaacgctctggcgtcgtcctcgcaattcggggcaacgccgtcttcctctgcaacagcgacctcgagatcaaccagggcatctttgtgacgccgaaccgcaacatcctcctgtcgagctcgggccgggcgcgcctccagaccgacctgacgaagctcaatccagacctcgccaagcacgtcccggcgtcgtcaggcattaagctccagccttccagcttccgtgatccgcttgtctttacgcccgttgtcgttgtcaagggcatctacaagagctgcgtcggcctcatcaccgacgtcaacggcgaggtctgccgggtcgaactccaggcgaccaatcagacaatcaccgtcaaaaaggatggtctgcgcaagaaggagtgcgtcgatcgtcgtcttttttttgcctctctcctcgctgacgatcgccagcgactctgttcctggcccatttcagcccggccaccggcgccatctccaaactgccggtcgtcgaagagtcatcgcaaggcgtgccctaccgccggccttcatccgagctgccggtggaacgttcgccgtcagtcatcaacccctacgccaacgacggtggacggacgcctgcctatgtcgttgggtgcacgcctaacccgctcgccgccgacagtgcgtcctgtcagcctcccctccgcgcgactgctgctgactgcgcttgcctttcgtctccagacgcaaccccaagccacctctgggcattcgacgccggcacgcccgaccatgcgatcggcggccggaccccggcttacaacgtcttgtcgggcggaatgacgcctcgcggcgacagcggcggcggcgtcgtcgttcacggcggccgaacgccgaccgcaagctacctcgtcgcggcgcgtacgcccactcgggccgatgccctcagtagccgcacgccggcgtatgcttccttcacctcgagcgaaggccggacgccaggctacgctgcgacggcggcggcgggcggaggtcggacgccagcgtacggcgcgatggccggcagctggacgcccgttccgagcagcagtggtcggacttggggcgccgcgacgccaatgggagcgggaagctcggcctacaccgatattccggtgcgtcgcccttgttggcccgaacatgcagaggactgagccttgctgaactgttctactcgccagcggcagaccaccggctcgggctacgattcgacgccgacgcctgacccgtccaaaatctcgttcgccccggcgccgcagctcggctcgaacctcgaagattgggactgaggcggcttttcaacggccaaaaacggagggagggagaggggcgcagagcgagcgagccgagtaccagtacgagaccccatgctatcctgtcttctcactcccaacctagcaaggcaggcgtagatcaggagcctcacatacgcatgctctcggccagacttctcggctcgagtacccaggcaacagctagccctcggcggctttgctcctcgtcgtctgctcggccgccggccgcgccgagagatggatcggcgccgacctcctcgaggtacttgtacagccgcatgagtgaggcccgattcgttgtcactgtcgtccagccgcggctcgttgcggcgcagagcgttcggatggtgtgtggcgtaagcgaaggcgagagccgtgggatggtcacgacgtcgatcgacgtttcgtcggaagagtgtgcactcgaccgaagcaaatgcgagaggagcaggtgcatctcggtgaacgtgtgctggtcggggccggccgaccgtgagcgagttgtttctggcggagcgagcgcgagtgcgtccgttggcgagctgcttgggaggagacggacgtccgagagagctctgtgaagcggcgtcaagccgtcggcgtagcgcgaagccgcccaccagcgcctcgttcgctcctcgcgctcggtggccgactcgccctcgacagcccagactgtccgcgcccggaggagctcctcgggcgaggcgagtttccggacaatcgtctcgagccgctggcggctttcctcggtcgcccagcaaacgacctcgccgtcaacgagcgcagagccgtcgacgagctcgtcgacgagcggatgctccatctcgaccccgagctggaccgtcagcgcccggacgttttcgctcccgccgagcatcgccgccgagcgctcggcctcggtccggagcgtgccgtctttgcggtactgccggacgagcgggaggaagacgccttcgggcccggcggatcgcggagggagggccatgtgcgagatgccgctcaggagggcgatcagaagcgagaggtcaaggacgagattagtcgtcggccggtatgctttcgaaggcgacgggacgaaggcgggcgccgctgatgatcgagtcgccgtctcgtctggcgagggcgcaagcgacacttcgacgccagggagtgaccggacctcgtcaagcaccgcttcgaccctcctacgatgctcggctggcagcctcgccagcgcctcgcgtgtaaaccgcggcagctggagctcgacgaccgccggcttcgggacgagtggcgagacgacgtttgtagccgagaggagcgcgtgcgcagccttgtgcaaggttgtcttggcgtgcgagcgatcaaagtggggcgactgcttgagagccgcgatcgaggacgagctcgaggcggcggacgtgctggatgagactgaggcgttggaggagtcgctgtcgaacgcgtctgagaagggcaatactgatcagctttgaccgcatcgaccacaacatcacaggcagggcgcctctcggccaaacgactgcacacgcaccatcctcgccaagctcaaagccgagccgactgaccgtcaggccacttagaatcttgatccatcgttggccaccagcacagacggcgttgaccttgacttcgcgcgggggggctttggcgcgtgcgcggttcgagcactgttgctgctgctgctgctcctgagtagcgccgtgaccgaccgttgatgtgcctggattgaagcgggccgagcgcacgagcttggggaggctgaacgtctggttgatgccgatcaagggggacggggcggccgcgagcgagctgaagacggcgaaaaggtgtgaggcgttggttgctggctcgggctgctgctgctgctgctgctggctcgtctcgtccggagttgaagggctggcagccaggagctgcaggacggaagatgacgccgtcagctaatccagcctcatacaagcaagctagtacaagcgcgcaccttctcgatgtaggcgatctccttgacgatggtcgccctcagcttgacggcgcccgggacggccgacggcccgacggcgagcggtgggagtgcaagcgagcccgagcggtctatgagcggcggctcgggtagacagaggctgtcgagtgctgggaggagggcgaagagccgggcgagcgagtcggcgagcgacatggtcatggtcggagggagcggccgggcgaaaaggggcgagctggctgggcgagagagagccgacgcctgagcacgagtacctcgacctcgaccaccatcatctcaaggaacgactagtagcagcgatcgctcgctatggccagatccgacgacgcaccatcctcgccacccgagccgccaggcctcctccggcggacgacgacgccgacgaactcgccctggctctaccgtctgctctcgcccttcgtcgcgtcctcttccccaacgaccggcggcggcggcagcagcagtagctcgggcaaggcgaaagcgatggcgaaggcggcgctcggaattggctcatctaccaactcgcctagtcaggtcgacgaaggctacgagagcgaggatgatccggccaggcactttggttcgtcctgccgctcggcgaccaccggttcccgtccgagttttccagctgagcgtccccatcgactcacatccttctcgtgacagacctcttgacggccttcccgattgagattagcctgaccatcctcgccttcctccctgcatcggacctcgcccggctgagcgccgtctcgcacgcgtgggcggctcttctcgccgacgagtgagtgagccgacacatacatgcgggttggctgctcgcctgctgatccgtaacggctgctaaccataacttctgtatgcgctcgctcgcagcttgacatggaagactaaatttgaggccgtgccgggctggcagctgcggccatcgtacctcgcctcgctcggctcggcacccggcccggccgacccgacgagcctgccttcttcaccgactcagctcctctcgtcgctctcgctctcttcgccacattggccgactgctggaccgctgccaagctcgacgacgaccgatcctctagcgctgccgctgtacaaggcgctctacgccaagcggctttgggtcgcccgccgcttcggccgcaacaacccgtatcggtcctcgtcgtccgcagaatcgctcgcggccgaactcgtcgtcagcgagcgcgagctctccgggcacgacgactcaatctacgccctcgcttttgacggcgccaaagttctgacgggatcgagggaccggtcgatcaagctctgggacatcgagagcggccagctgatcgggacggtcgagggcgcacatcaggcgagcgtgctctgcatcgcgtttgaggaggctgggccggaggagggtggcatgggggcgctcgcggtcagcggcggcagcgacggcgtcgttgcgctctgggcccttggcggtatgttttgttgcgcttgctcctcgtccctctgccaccttgactgaacaggcttgcatgcgcgcaggtccgggactgccgaaagggcccttggtcaagatcagcatcctcaccgggcacacccagggcgtcctcgacgtcgcaatcaatgccgactacatcgtctcttggtcagtcctgggccatcgttgtccgagattctgtgtcgctccgtcttctgacgcccgccgtgcctcagctcaaaagacacaacgatcctcgtccacacgcgctcggcgccccacgcgcttctctaccggctcgacctccacaccggcccagtcaatgcgctctcacttgacggccacctgctcgcgagcgcctcgggtgacggccgcgtccggctctgggacctcaggacgggcgcgttcgtccgccggctgaagggtcatgagcgcgggctggcgtgcgtcagcttgaaggagggctgggtcgtcagcggcagcaacgaccagtcgtgagactcgcctccgtccccctctgaactttgcacatcgcgctgacacttctgcgccctccttgtgctcggggccgccagcatcaaggtctggaatgctgacacaggcgagtgcatccggacgcttaaaggccacaccgacctcgtccgctccctcgactttactccctcggccggcgtcatcgtctctggcgggtgcgctccgccccgcttcctccccctcctttcatcgccgactgatctccttgctctcggatcagctacgacaaaaagatcatggtctggtcgcttaagacgggtgccctcctccggacgctcgagtcgtctcacacgtcgcacgtctttgatctcgcgctcgatgggtccaagattgtcagcgccgggcacgacaagcgggcgttcgtctatgactttggcgacggcgagacgggaaggctgtttgtgtaatggaggttctggtcaatgttgcatgtcgtatcgtccttctcgcactttggcgggcgaaccggtcctgtctgtgcatcagcccacgcgtcgttcggaggcgttcgtgaatgagctttggatcacgacctggtcggccgcccacgagcagcaactcctctgtccagcgagcgactcgcaaattggttctccatcgcctgcactcgtgacagatatcctgcacgggccgtcaacaacagctgcatactcggcccgtcgaccggcggacgaagacggcctgctggcagagctcgaggttgcgcttgactcggcgcgcctcgcctcgttgcccttgtccgccgacacgcaccctctcccctgcgactggactgcttggccagctctcatcgacctaggatcggttgctctgcctcctgctgcacgctgagcctgagtgtcacgccgtcgtcgaccccaattgcccgcctcggtcccctccgagctcttgtcgcggcagccgacccggttatcgcctcagccgcccggacctctcgacgactacaaccctcgccctcccttctgcctcctcgtccaagcacgatgtcggccagcaacgcgcttcaaggccagtcggtctccgaaagcccgccttcgccagcagacgaccggtcgggctcggcgcagcgcaaagagaagctcaagcggtcaaaggacggctgcttcagcgtgcgtccctctcctgctaagcgcgctctctgggcagcggtgatctaccgggtcgacggacgcgacggctaatccgctcatggtcttccttcgatcctccccagtgccgaggacggaagaagcgctgctccttcacccggcccgtctgcgagtcatggtgcgtcagggtcatctccccctctgtcgcgccgtcgcacctggccgaacttgtcgcccgcgggagctaatcgtctctcctctgtcgttccatctcgcagcgaacggctcggcctggtctgccagtggcctgtgatgggccgggatgagaagggccggatggtcgtcgtcaaccgaccaccaaagcgggccaagctgaacccggccgagggaggagtgagctacaaggcggccgaggacgccggtgggagcgagcacgacggcagccaggcgagcgggagccactcgggcggtggtcagtggccgccgaggtcggcctcgccggcgcgaggtcagaaacaggcgtcgtcgtcgtcgtcgacctcggcgacagcggccgcctcggcctcgaccatcctctcggccctcgcgaacggccggcccatcgccgggatgcggatggaggactgggcgctctcgctcggccagcttggacttgtcgcccacccgcctccggcggccgactcgccgcttgcactgcctgctcagggtccgacgccgcggactgccgcgcaggagaccgacgacctcctcgagtttctcctcccgcagtatcaccgcagcgtccaggccgctcaggcctcatcaacgtctgggccctctgcggtcggccctagtaagagtcagccgtccctcgtgcccgctcgagcgaccgacgccgaggccgaggccttcttaaacgcggccatgtttcccaacacgccgcaagctttccgggatgcgctcggccagacccaccacctacctgcggcggccttcatgccgtcggccgacgtcaaccacggtccagccaacggacaagactcgggctcgacgtttggtccgctcgaggccggcccgcaaagccagcagcagccaatgctcgcgccgtcccccgcagcggccaataacctctcgccctggttcgaagaggcgctcaacggcgcgtcgccgcggacctttgccgagacgttcaacatggccggtttttcgcccggccccggccagacgccgcagaacggcagcctacccgccggcgtcgacctcgccaacttctctgcggccgactggctcgtctcgacgccgcggccagagacgtcgggttcatcggcgagtcgggcacgtacgccacaaatgggtggtgggcggctcgctgacgtcctgtcgcaagcgagtccgatgacggccgcgctcgccggcttcgacctgaatgcctttctcgagcagcagcggagtcgcgggaactcgatcagccagccggcaccaccgcagcctgcgctcagcctgaataatcagcagcaaggccagcatcagccgcaaagatcgtccgaaggcagacctcagcgtcggccaggcgacagcccgcttaacccgatcgtcccgcccttgcaatcggccactcgcaagcgaactgcggacgaggcggcgctcggcttacaacaggcgccccaggcctctttcgacggcaatgtcgacgggacgttcgacttcgacttcgacgagctcgatgaagacaacggtgacgactcgtcggacgagggcgacgtcgacggcgtcatttcgcgccagtcgctcgatggcccgcgcgacaaaggcaagaaccggatgctaacgctccacccgtcggcgggaccgaacctttcgatccggctaccggccaacttgccctcggttcgtctctacctactgctcggcagcacttccacagagcctgatcctcgctcacgtccgcccctcgatcagtttatcgcttcgcaagcgcctgaacttatcgagtactttctgcgcgagcttgcaccgctcgtgtcggtcctgacgcccgaccaaaagtcggtcaacgcgctttccaaggccgtctcaggcggggctgcccttcgaggccgcttcgagagcgaaagctcaatcggtgggggcgggagcatagagcgtcgggcggggaacgatttggcgagctgcttcctgccgatggcgctcgagagcgactcactcgtcagtccttgtccatcgacgctcagctgcaggcggagctgacattcaggtccccaacgtagctggtcggcatcgtcgcctggtacgtcgtgcctgtacgaatttccacccttgcctcttgctgacggctgagtgcgcttcgttttacaggagcgccatgcaccgctcggacgtcggccagccctggcgagagattgccgaccagatgaccgacgacgcctcgacgcgcgcgagcaaggcgttttgcgagtgggagagcaactcgctcacgattggcagcgtcgaggccgatcgtgaggccgagaagctgcttgggacgctcatcctgctctccgagatcgaggttcgtacttgtccttgtttaagtgggtttcgctttgcagactgacgacgttccgatggccacactccagatctgccgcggctcgaccgagcattggtactcgccgctgcagatggcacagaaggtcctccaaaggatgggaggcagcaaagggctctcgcgcctgtcgtggaatggcaagtggctcatgcagaattacgtctaccacgaactcacggtgcgtgctcgccaggtctctcaccttcgctgctggtcggagttacagctgaccaagctcctctttgccggtgcagtcgagcctgcttccgcttgaaggacccgtctttgacgaggagacgtacaaggtcgtcctcgagggcgggctcaacacatttatggggagcacgatgccgatcttccaggtccgttcgctgtctcacaatcggttggcagatggcgactgatcgtccctccccggcaaacgagatgagcgctagtctcgtgggctcggagatgtatataagagacagggggagcgcgcgcgggagaccaaccgcaaagtcagctcagcatccacaaggccaaaaaggatacgaaacagcgcagcgcggcgccaaaaagatccggaaggagatacgcacgtaacggaggcgccggtgttgttcgtgaaggcaagcgtgacgtaggcccagctgatagggctccaaagggcctcccagatctgggaccagttgacgctcgatgactccttcccgccctggttctcggaaacgcgctggacggcccatccccgctcctcctcagtaaggaaccgggcaaaggccgggccgttgtcgagcctccagtaaatgatggggccggtgatgaccgtgatgatgccgacgatgaggaagaggatctggtaaaggtagagggtcgggttcttgatgtgcgacagggcccaggcgaggagcgagccgaggattgaggcaactccgttcgtaccgtaccagagggcgacccgaatcggctgctcctgccggcggtaccaggtggcggtgaccatggcgaagaggggcaggcacgaggcctcaaagaggccaaggaggaagcggcaggcgaggagcgtgccaaagtttgtcgagaaggcgaggccgacggtcgagagtccccaagcggtgacgaggaagggcatcaggtctagccagggggcagaaggggattagccgaggtcggtcgactttgaagccgagcgacttgactcacagcggacagggaccttgaccatgacgatggccgagaaaggctgccaggcgagctgcgccctacgaggttggcagaaagcagaaggtcagtctacgggtcggctaagggctccgtagcccaggtttagctggtcaaacggaccagtatccggcacttccgatggtcgagtactcgttgccgacgagaccagcgtcggtgcgcagtccaagaatggcgccgtagccaacgaccgacttgtccaggatttggagaaactggagccagcgtcggaagccccaagagtgtcaaaccggctgcgcgcgcacccgcgttttcagggcaaagagggcacgcacgtagacccagatgagaaggggcaggatgacccggtcaattttgcggcagacgaggcggctctgctcgtcggtgacgggaatgaagttggcgtccgcaggcgagttaaagtcactaggaaggaagagagtgcccagatcagcatcggctgcggctcgcccgtgtaaatcagatcgcgccgactcacttgtgctgcgaatggacgtcgttgtggtaggtgtcgagcttctcgtcgttgtactcgtgctcgtgcgtggagggagtcatgttgggctagctcgaaggcgtgggccgagagaggtctgtgcgggcggtgcggcggctgggaaggggtcgaccgagtgtcgagagctcgaggggcctgataggctcgggctggactaagctgggctgcgagcacagggaagggctggcggggtgatgtggaggtaggggatcggaagaaaggtggccttgactccccgagccggcgacctttaaagcaggtcggctgcccggatgagcttgggtcgatcagccgcgggtcagggcaaggagcggcaaccgcaacagggctcggcggtcggggagacgtgtgcggacggaggtctgcggctcaaccggcagtcggaacggagagcggtcgccaaacgcccccggtcagctcgtcgtttcggaccgaggcctctcagcaaacgccagccagcccgaccgcggcccaggtcgacgggaagaaacgggcgcgacagccctgcacgcagtggcagctcgtcgattcgccgttgggagagcagccctgcctctctttccatgcctctgcccttcctgctgtatgtcggtagccggccggctgaacgaccggccgagagcctctttctttgcacgacccggcgcttgcccgcccatccagcctggcccggtcggcccgcccgcgagctcgccgtgcctgttcgagattgggagattcagaaaaattaaaatcctgggaaggccaggccaggatgcgggatcagctcgagttgacgcggtgatgaatgcttggtcgaagcgggcagcgcctgacactcacgccttgacctcggccggcccgatgcgccggtgagccggtgagccgatggtcgttcggagcttcgggccatgcaagccgcagtcgtcgtcgggcagaacgggcttgcgactgagcgcgttgttgagaggcccgtcaggcatgggcaggggcctcggaggcgatctcggtagcctcgcgagcgacactcggtcgtcaaggacgcgagcgacgcggcttaacttggatgcgctgccgacgagatgatcgggtcgagcagacagggccgtcgcagcgatgccttcgagtcggccttcgtacgtacttggccgtaccgacgacgcgccgttctgtcagcagatcaaggttcacgtcagcattcgaggaaaaggctgccacgcgaggaaggccaacgtactgctctctgccgtctggtgtaaagtcatgcctagacactggagccagcgattagtcgagctgcactcaggtacagcaacaagcatcagcatctcgtttaacatcaccggcagaggcatttcagagtccaccacgaagttccgtcggcagatgttggccatcgggaggaagggccgtctttgagaaagactgcgaaggtctgcgaggcacccattactggccgacagaaatggtgcaggacgggcgacgagtcaggcgccagccaacccggggagaaggaggcagacggcacctacgcttcggcgagtacaccctggcgtgtatctcgtccgatgactcgatgacgaggtcttctttcgggtcgtcgaagaaggggtttagagggaactgccggcgaggaataacacaaatcagcatctgttccggctgcaagagggctagatgggactttaaacggacagaggtatcgatggcgaaggtgtgaggcggccggtcgtccatgcaaggcttgccgggggttggctagcagtctagcgctgcgacagaaggcgacgattcggatggaacgataggctcggcttttcgcttgcccctggctgcagaggtggccctcggggtcactagccgctcgtctgttgcgttgccagacggcccttctgcgggagagcagctgatgacccttctgcgatgagcaagcgccgtgcctttcgttcgagcagtcgagcggcagcgcgagtccttcttgctgcgcctgccgacgtcctcctcgtaaagctccgacgagtccggactcgctttgcgtttcgatctcgcgcggcccttggatctcgcgccagacgtcccgctggtctctgacgagcgctcgtcgtcgtcgtcgatgctcgtcggtgatcgctcgatgagctcgcctgtgctctcgtcgcgcaaggcgtgggtcgcttgaaatcgccgagcctcctccgtgtcaacgagcttgtaccaggagctgccgtcgacagctttgaaagtcagaggaagctctcgcagccggcgatccttcgaattgagcttccaatactggagggtcgcctggcagcgtcaggcgtcagagaggcagcgcgcgctgtgccgtcaggagagcgagagctcacctcgttgacctcgcacgagagttcgcggccttcctttagttggggaaacagatgggaaagaggcatcacgtccgcgcgttggctcgaccgagcgctcggctggcccagtagttgacgtcgtacgactcgcacttgatcatgggactgtcggagggaggagaggagggtctcggggcgcgtgcggctgtcgaagcgtgcccaatgaagcaaggcaacgggagaggaggtgtgaggtcgatccggtgggctgacaggcgaatggctttcagatagtttacagtagcaggacggtctggaaagcggttgtgacgggtgatgggctgcggtcgaggtcgaggttgaggtcagaacaagggaggcgcgaccacgcgtcagccccggccagtcgtcccgctgacgaccggcgcttcctgccccggcttcctctggaacgccactcctcgctcgtcgagcagatctcggacaataaacacgtccgggcgcaagcgcatcaaaggggcccgggcgagcggagcaacaagataagcaggcaggctgtcggtcgagacgggctgcgcgaagccggacgcgatcgaaccgaggtgggacgccgtcggtagccggccgagggtgctcgccctcctccctccctccgagccctcacctcgcgaactgggtatttcgagaggaggctcgaactgggtatcagaactctgtcgaattcaaggaactcgggcagcgccgaggtcgaaggtgcctgccgcacgagcttggcggccttgacctcggccggctatcgtcgcgccgctgccgccattcttgacctcggccggcaaacgatggcggcggctgtcgagcgctgtcgctgccgggagccgggtatgccaggtcttgcaggcgcgcctgtcgtgcacggccagccaggtggttgtctgctggtctagctatgtcaggcgaccaattactgggacggcgggcttggagccgtcggcaagggcgagggtcagctcgagccacgctgttgcccctcgatgggcagcaagccttcccgaatcgagctctgacaggtagaagcagcgcactctgcacgctctctgcggagcgtggcagcaggtcaggcctcaggctcgacgctgctcgtacagggcaactcggccgggctcgtcagcgactctcagcgtgcgtcatgcgggcagcccggtggaggtcgcacctcgactgccggcagcaagccatctcgaacgtatctccgaaccatcatctcgcccgagaatcagacagctcgtaagtgaacctgcaaagcgcacctcttgctagcaggtgggaccgccattgacagccagaggatcgtgctgctgctcgtcgcagcaccccaaagcccccaccctgcccaccagccagctcctcctgatctcctccgcctgccgcccatgtcgctcaataagatcgttgtcgtcaccggcgccaacaaggtcgatcgcgagcatgctttggctcggcttcgagatctgcctactgacgtctgctatcaatttaattagggcatcggcaaagcaatcgtcacgctccttgcccagtcgccgccggagccgcctctgactgtgtacctctgttcccgagacccatcccggggcgagggctcgctcaaggaggtcgaggctgccaagaagggtccgcacgagatccggctcggcaagctcgacgtgctcgaccaggcgagcgtcgatgccttccgcagcgcgatcgagaaggagcacggcaaggtgcgagccccgagaagactgcgctctcgtgcctgcgctggctgaccaactcttcctgtaccccatcgtcgccctggcagctcgacatcctcatcggtaacgccggcattgccatctcgggcgaccgctttgacgtcaacgtcgtccgggacgcgttcgccgtcaactactggggcaacaagcgtccgtcctgcctgcccgctcctgagtatacccaccctccgctgaccacctgccgtcctgcgctgtaggcgtgactgaggctctcctgccgctgctcaagaaggccgacagcccgcggatcgtcaatgtcgcctcaaccgccggtctctcgagccttatcaaggatgaccgcctgcgcgagcgcttcacgaagcccgacctgaccgtcgaggagctcgaggccgccatcaaggactttgagagtgctgtcgggaagggtacctggaaggaggacggctggccttcgtcgggctacggcatgtcgaagtacgtctgtctcaccccttgagtccctgtgctgcagctgataatcccctccgtaggctgtcgctcacggccctaaccaagatcctcgcccgcgagaacccggacatggtcatcaacgcctgctgccctgggtctgtccacctcgttctggcgcctcagttctaattgaaagctcgtcagcgctgacggctgaccacgactctcgccccggacagatatgtccagaccgacatggcgcccaagggagccaagacgcccgcgcagggtgctgcgacgcccgtccagctcgcgctcgacgacctcggcgggaagacgggcgagttctggcgcgacggcaaggttgcgccttggtgagcgcttccattgcctaagcgccgttgctttcgacctgtattcatgcgttgcaagtttgtcaaggccagtgcacggatgagagagaggcaagcaggtgcaccgaccggtgacgaggtcgtacgctgcaacctggcggcgtcgacgacggctcgtgccgcgcggcctgcgagtggagtggcctgcgcagagcgagcaggcgaccctctcgtgctgccgacgacaccgacccgcctctacacccctcgactcccttgagctctgaaaggccacagtctacttcttcgctcgtccagtcctctccgctccactttattgcggttgtttccttgcctacgatggtgcggccgccccaagcggacttttctgacacggcgagccagccgagccgtctcttgcgcgcagggctgaccctccttccacccgccgccgcctggcagtcgaacctcccgagggtgatcacgcaggtcgtcctgacgggcagcaaaatctttggccgggcaatgtacgaggccggccggcaggcgtacaagagtgcgtccgtcgaccttctgctcggggctgcctccaccctggccttcagcgcgcgcgagctcgacctgagtacctcggctgatccctcgcaacgccttgccctccgatcagacacgcagtaccggcctgagaacccgcaggcgggtggcgaggagggtggtgctgccgctgacggctcgggctcgccgagcacgaccgccggcatcacgcgctcgttgcggatgacacttcaggaagcccagctcatcctgaacgtcaaggagggcgagacggctgagaagcttagggaggtcggtcgctgcttttcccctccgcccgctctttctgttcgcttcgctgatgagctttctctgtcttgcctccccagcgctacgacattcttttcgaggccaactcgccgccaaaggtcgacccggacgcaccgccggcgccgccgctgacggccaagcagaagcggcagcagccgcccatgtactcgcactacctccagtccaaggtcgtccgcgcgctcgagcggctcgaaagcgaacacaagatgtgggccgagctagaccaggcggccaacggcaagctggcagagacgacgagcgaacaggtcgggggcgaggcggtcccgcttgagggcgagccgccgaaggctgccgagccagaggccaaggcagaggccgacaagaagacctcgccgtagaggctgaggccggggaggtggtcgccccccgcgatggatgatcatcacccctcagcactcacgcccgagcaccgacgctcggaggcaaggggctttctccaaaccgcctgccgagactcgcttcgctcgctacggaaaagtgtctagatggataggtaagggcgcccacggtgctctcacagcaagacgcccttgcgtcccggcccgggcgtctgcccgccctcgtcgtccgagccctcgccaatgctgacgtccccgtcctcgtcgcccgaggcgccttcgagcgggaccgtcatcttgcccccgcggatgcactcctggccggcctccgacttgagatgcctcgagagcgcgtcgagccgcgcaaagcgcttgtcgcagccgaggcagacgtgcggccggtagccgacgtggagcgccatgtggcgcttgcagtcgtgcgcccgggcgaaacccttctggcaggtcgagcacttgaagggccgctcgtccgtgtgcgagcgtaggtggcccttgaggttgaacgagcgcgtaaaggtcgagccgcagccagggatcgggcagacgaaggtggcctgcgagtcgagaggatcagcaacggagctgttggggtgcaaaggctggtgcatgacggaagcactcaccgccgtcttgcgtcggccctgggaggcggccgcagtcttctttgtcgtcacgctctgcttcgctacgctcccgacgctgctgcccgagccaccaaccatctcgtcgtcctcattgtcggtcgatgacagcgcccggagctcgggcgtcggcgaccggacgggcgagcgcggtcgtgcccgcgcgggcgagcgcgtcgacgcggaagagtcgatgccgcccgagggggagccacgcgagcgaacgaggacgagagggacgccgagggtgccgtctggccgggcgtacgtcatgtcgaccgactggacctgggtgaagcgtaaaaaaaggaaggtgtcagtcacgtttgagctgtgacgaagcgggagtgagatcaataggcagacgacgcaccttgcgatggccttgccgacctcgtccggcatcgctcacgctccgctggacgccgaccgagccgcccgccgtctctgacccgttcgcgccgtgcgggtgcaacagtccaacgccatagcccggcgtgcccgccccaaagctgcgagccaacgtgtggctcggcctgcgcggcccgcccgccggcgagtcgcccgcctccgaccctccggcgtcgctcccgttgggcgagtggccaaaggccggataagagcccgagggcaagagctcgctcggcgggagcgggttgaacgccggaatgaggttgttgccgccgccgccgccgggcgggaggaggctcgaaatcgaccttggcgacgacgacggcgactccatttgctgcgcctggcccgggaagaagctgttgttcccgccgccgccgaggtccgagagcatgtttgggttcatcgtcgccgccgtcgacgacagactgctcatcacaaagtcgtacgggagagccgacgcgtcggaccgcgatcgctggcgctttggcggctggcgccggtgcggcgtgaacgagcccgagccgtcgtccggcggcgaggccgacgtcttcgtgacggccggccctcctgctgagccgggtcccagacttgactgctgctgctgctgctgctgctgctgctgctgctgctgctggtgctggacgtgctgctgctggaggaactgaagcgcgtcgggattcatatagtacgacggcccgggctggccgtagagcgggaaggccgggctttgctgctgctgctgctgcgtcatgagcggcgggaagaccgagctgttgaacgaaggcgccatccacatcgggaggccgctgtcgactgggagcgaggcggagatcccgctgctaccgccgttgccgttgttgtaaaacgaatgggccgtctgctgaccaaaggaggaggaagacatctgctggccgaacggctgcaggttcgggatcgactgcggttgcgggtaggcaccgttcgagcccgaggcaaagagcgacgacaggccagacgcatggccgcccatcggctgcgggggctccattgcgccccctgaccgactagaactctgttgctgctgctgcggctgttgaccgccgttcgagccagcctggccgctgcgctggccattgagcgcagcgagcgcctcggcaaacgcagcgttctgctgaaggctcgtcggcggcgcggcaaagtgggagccctgctgttgctgttgctgctgttgctgtgggagcggctggagctgcgcttccctccccgtcggcgaagcttggcgaaaaaagccctggagccgggggtcgagtggcgggaagagcatcgccgccgcgcctggtgcctcgaacggcgacgtcaccgagggtgacgtcccgggcgacgtgccgagctggctcgtgtcgagccggccgagcggcgaggccgccgtcgccgtcggaatcgaaaggaccggctgtcgggcgccactgctcgaagggtacgacgccggcgcatagtggtggggctggaccgtcatcgtgctgtcggtcgtctctgtccttgtcggcgggcggtagagctgcggcagccgttgggtaaacgagccggcagcaatcgggctgctgctgttcgcccctccgccgccggcgtcggacgcgccgtcggtgtagggcgagcggtggccggtgtagtgcgagggcgagttgccggaggcgtcgttgggactgctcgccggcccgtcctgcgatccgaagtcggagcctaaagggcagcgaggcgggcgcagtcggcgaaaggggggatatcagctcggaatcgtctgagcgagacggtcaagatctggcccgagcggtagagaaggaaccgacctggcgaccggtgctgctgctgctgttgctgctgttgctgctgttgctgctgttgctggaggacgtcctgcccccaagcctgaagcatccgaatgacgtcgctccccagcccgccgttcgccatcgcggccgagtcggcaccggctgctgcttcctcgccctctcggtcggccgacgagtcctggccgggcctggcaccgccaggcgattggccgccgtcgtccgcaatgtcgagaaagtccatccggccgccgaacggctcgtcaaaatagctcccgccgccgttggcgcccccgtcgtcctggtacgagccgtacgaggacgcataggacggcgtgtagtagccgccggcggccgaggcgccatcggccgtgaaggacccgctctcggacggcgggcccgccggcgagcggtggaagctcccgagctcgaacgcgggcgaggcggcggacgaaggcgaggacgagccgagcccgttgcctgcacctccgccgccgccgccgccggaggagttgccataggccgtctcgccagctgcggcccagaggtcggtgctgtcgacgcgcttgcctccgccgttcggcggcgcgtgcgcgtactcggacgtcaggatgacggccggcgtcggctggccctgctgctgctgctgctgctgccagccgccggggctcggctcgagcttgggtgacgacggcgaaagctggatcgaaggcgacgggagcgagagcggctcgtgatgctgctgctgtcggccgctgacactgctaccaccactgccgccgctcccggcgccgcctcgatcggtcggcgacgcgccgtgctggctctggcgcgagcccggcctcggcgagagcgcctcggtgatgttggcctggctgatgctcgcgagtacgcggtcaaactcctcgtcgctcgctgggatgagcgtccggttcatccgactcgtcggcggcggcagcccagtcggcggaggggacgggtggtggtggtgcgtcgagcgcgagggcgagtgctgctgggccgtcggtgggctgaggtagcggccgtatctgctgcggctgctggccggcgattcggcgagagaggggaggcggccaaaggggtcagccatcgtcgacgacggcgcgcatgctctcgtgcgggggcagggagagggaggtggggagcgtcctcggtcggcggaggcccagtcggtcgccgatgccgtcacacacggcgtgattatcaaagggcgggcaaggatgggatgctcacgcgtgcgcttacggagagctggcctggctgggcagggctcgagggaagacggggatgcggcggtggtcgggtcaaggcgcggtgaggcggagcagcgaggcggtgcgcccggcaacttgggacgagctgggcgggagcggccgacgagggagacggccgacgtgaccggacgagggatgcttggactgctggctgcgagtaagtcaagacgggtgtatgcgctcacttcctcctcttgctgctggatggatgttcgttggaagagagagcaagacagccaacgagccttcgcggtctctctcgcccagcctcgcgcgcgcgcccatcaagagggagcccctttcgcctgccggtgccccgaccatctgcttaaagacgactggctagctgctcgccgggacggcaaaagtctgacttgaagctgtcaggatccggcgcacgaaccagatctgaccctgcgaggacgatgcctcgggcagaaacctgcagcctgacgagagacgaagacaacgacaatctcttgccggcgaatccgtttagaaaggagacatggcgccgccaagcggccgcaggaccaacaggctacctcggagccgcttccgggtcttccggcccgacatactgtaaacgtcgcgatcgcgagatgtcatttgagatgcgagggttcggcggaaagaagggaaccgcccgcccgcctgcaacatcagcttcggcgatgagtgcgcctctaaggtcggcctctacatagacgattagacctccgccgaggaggaaaagaatccaagggactcggtagagaggacccgcgtcgacctgctcgtcgtgtccgtcgacaacgcggctgtcttgcatgtgagacgagctgggaagcaagcaggaggggggagggggcaaaggggccagggcacctacctcggcccagcgatccgacggccggcggacaaacaggcccctacgtaccgtgcaggaaccaaagcagggcttggttgatgccctctcgtcgaaagcaggacgtcgtgccttctattgctcgccgtcggccggccggacgacgccgctcgtcaggagcttggcgagggtcgtgtcgtgctccatgcccgagctgtcgagcgggcgaagcgaagcgagcgaaagcaagcgccgtcagcaacgcaacgcgacgcggttcgagactctgaaggccaggtgagcgcgcgcgcgtacctcagtccgcgcaacgcaagcgctagcactggcccggcttccatctcgagcttctcgacgccatcgagcccgtcggcccggctcgggccgagcgacaggattaagacgggctttttggcgtcgcgggcttgcttgatgagtctatgccgaggcgggagacgaagggaggagggtcaggcgaggggaaaagatgaggatggccggagggggacacaccggaaggcagaatacgtcgctaagctcgtgcccatgacgagcagctgcgacgagtccgcgacggcctccgcactgttcaaaacaaccgacaaaagcgagtcttcaacctcacgcttctcggcagtacgcgaaaatcgggggcggagagggacggcacgcacgaccgggccttgacggcgtcggtgattgactcgccgaaaaaaacgacgttgggcttcatctgcgattggtacgaaggagcgggggcgtagtagacgttatcagctggcagaagcgtccaagccgaggcagaagggggagggggagaacgcacgacctctccgcagtcctgacagggcgggacgacgaagccgtcgtatgatttgccttggagatcgacctgcgaagcgagcgaaccggtcgatgtgagtctctgaattgggacgtaagtcgcagcggcgagcgcaacgcacgtcgccatccggattcgtcgccggcaacgtccccgtccgctccgcctcgtccgcaaacgccttccagctcggatttaactcagacagccgttcctggtaggccgcgcgcgagacgacgtggccgttccggcaatggacgagatggagcgtgccatggaggtcgaggatccggttggcggtctcggactgcgagtaggggaaggccttttggtggaggccgtcgacctgcgcgcgcgaggtaatgattggtgaaagagcccaacagaggtcagtaggagcagagaaagaggagcatcccgcttggaggagtgcgaaaggggaccaacgttctgggtgatgacctgccgggcgagcttcatccacagcatggccgcgacggcatagtggattggattcggctccgactcgctcaccggccgccagccgaggtagcctcgactccagtacttcttgcggactagaaggcggccgttccgagacggagcgagagagaggaggcagcgtcagtcgggaaaggggacggcctggtcggctgcgcagctcgcgcatcgagaggcagaaggccggcgacgcacaatcgacgccctttgggctcgggtcgacgagctcgtggtagaggatcggcttgaagttggggttcgagtaccggctggagggtgttgtgggaggtgctcggtcagagcgaggtcctctgggatgctgcccagccagcgtagagacgggtcgatgacgagctgccgccgaggtcgttgaggcagcttcaggcagaccttactcgacatcctgcagcaacagcaggcgatcacgagccgttcagaccccacgcacccgtcatgcccgcgatacgccttgatgccgctatcgaccgagacgcccgcgccggtgacgacgagcgtcctcccgcggccgcgctggaggaacgaggcgacgtgggcggcggcctgggcgggcgtgagggacgcgtggggcgagacgtagggcgtcgcaagctgggggagggtcgggatcgagattcggaccattgcctgctctcgagagggttacctgcaaggggggtcgtcgggaaggtaggcctgcaggtcgtcgacggataccggggctgagatcggagggagcgccggcggccgcccgattcgctgcaggcgacgaccggccgagtacgcatcgagcgacggcccactttctatcaccagcacagacaggaagagcagcgcgcatagtcatccgtcgagcgcagggtcgacggccatctctcccgcctgctgctgctgctgctgctgctcgccgccgccgccgtcctccccctcttcggcttctccgcccgtcaccccggccgagccgtcgtctattcctccagcaggcaccgtctcgtgctcgccggggacaaactcaagcccttccgtgtcgccgccatcgtcgtgcgcgacctgcagctcatgctcaacgacgtcctcggccgtcgtcagagccgccgccgacgatgacgcgggcggcgcggcgcctcccgccgccacggcggccagctcggcctcgagccggtcaaccgtctcccgcaagcccgcattctcgttccggagctcgccgatcgtcgcattggcgagccggagcctgcgcaagaagcgggcggaagaggttagctgactggccgaggcggggatgcgccggcgaaaggtcggcctggacggacctccgggcagtgtcggcctcattgacctgggcgaggtgcagcgtccgcgctttctcctccaagtcggcaatgtgtctgccggttaaaaaaatgaccttcgtcagcaaggcgacttgcaggcgacggatccccggcgcggactaaagacgccacttttcgcgccgctcgcggaacgcccgctgggcctgccggttctgctcggcccgcttctgcttcttgcgtttgtggtcgaacaactcgtcgccgtcgtcatcgtcgacgccgccaacgccgccgccttccgagccctcgccggccgagccgccggcgcttgccgtacgggccttgccggccgcttttgccgagcccgaggagggcgctactggccgcttgagcaacatggcgtcgagagaggagagcggagcgttgcccagaggcgctagccgcgaggacgatgcgatcagctgctcgtgcctctgcattgcgcccgacgacgacgatgacgacgaggcgtgggcatgaggatacgggcctgtcgacccgcccgcgagcgccgggtccgggtacgggttgaaagggccgggcgtgtactggatcggtggaaggtgcgtccgttcggcagcgttcgacttgctgctgtcgtgtgaatctgaggcggggtggacgagatggctgaaggagtggggcgtcgaggccgggtgctgcgccgtccctgctgtcgggccagacgggtgctcgaccgtcggaccgtgactggttgcgtcgcccatcccttcctcatacgtctcgtccttgctggctgcgagagcgattcgaagcaagctcgcgaggggtcgtcagtatctgccctgccctctgaggaagcggcgataaagccgaacgaaccactttcggcagcagcggcatgatcagcagcagcagcgcggccgcggttgccttaggtaagggagatccgggccaggcggccgggatgaaagggggaggggggggaagatgcacctccagcagcggccgagtggctcgggtcgtcgacaggcggccaggctggtgctgtgtcgtagtgcgtgttcggatccatctgcgggaagaggaggagggtgacagggtgagggagaaaaggagggacagggcaggtcggcgtcggcgttaggtaagctcgcggcgggcgtgccgggcgagcgagcttgacgctgccggcctctgctgttggtcgacatgatcactctttcgacctcgtcatacgtcggcgcgctgcagctatgccgacaaggctgacctgtctctatcctaccgtttgaggagcctcagcccttgtcggtctctcgtgcccggtctgctgctgctgccggctcgacggccggctccggctccggcgggccgacgacgacccggccgcagccagactatgaggcacgacaggccagtcaggccatcctacgaccacctcatcctcctcgctccttgcacctcttccaaacgagccatggccgtacccgccccggttctgcccgcagccctcaaccccgccagcgacgagcccgcccgaccagcggtattcgaccagcccggcgacggccgacggcggtccctgacaccgaccacgagctcgccgacgctcgaccgctcctcgaggcgcttgaccagcgtcagcgaagaggacgaccgggctacctcagcggtttctggcagggaactgtcgagtgcatgcccgtcgtggacctcctctacgtcgttgtcggcagcaacttccttctcgcgctcggccgctcagcagacgcccgtccggcttaccgacacgaagcgcggcaacggcctcggcaacgaagtcccgccgacgttgagctctccgttgataggagaccgggaggacaacgagaagttcgaaggccgagacgggcataaggagtcgagcgacgaggacgaggccgaggcgcagcggtcgacggcgctgccggctgacgaggacgagtggacgtacccggacggggggtatcaagcttggtcggtctatttcggtgtcaatctcacccgaaaggagggcagtcgctgactagctgggtggacatgtgccagggcgacgacgatcggttgcttcatctacgcaggcacaacggtctgccatccgctgacctcccttccgcagccgtcgtcgctctcgctaacatgactcttctgcacggaccgttcgcagatgggcttcgtgcgtctctcagtctccgagtcggctcctgatctgctttatccccggtgactgacacctcgctgctgtctttggctcgccgtacaatgccagggcctcagctggggcatcttccaaaactactattcgacagtcaccttcagagaaaccgacgagtcgattataacgctgatcggaggcctcgctgcctttgtgcgatctcgtctttgcgggagctgctcaactcgatgagcaacggctgacctgcgcctgtcttgcacccacagacgatgaacgcgacgtccttctttggcggccggctcggcgaccgcttgtacgcgcgaccttccctccctgaggttgcctcagtgctgacagatcgcgtggccctacccttggctgccctcaagcggctacaaggtctgttgcccgctcctccattgctcaaacgactcgcaaagcggctgacaacccgcatcccttgccctgcagcgcatgctcacgatcggctccatcatgtgtttcgtcagcttcttcctcatggcttggggcaccgatcacctctggtcggtctttctgtgcgtgtcgctttccccttttctccttcttccattttggccctgcgacgctgatactgctcgggcttccgccctgacagcttgcaaggcttcctgaacggcttttgcctcggcttttgcatgccgatctcgatggcccttccgagccaatggttcgacaagcggcgcgggctcgcgaccggtccgtctcgcccccttcctcccctttcccccctcgtcgctgacccttccctgtacggtctctgtcaaggcatcgcaacgagtggctcggggcttatcggcggcgtcatggctctactcgtccgggtgatgattgtccgcatcgggccgcgcaacacactcctcgtcgtcgccggcatccacggggtgcgactttgaccgccgcctacatctcatgcttccaagctcactgaccaagctcatcctttgcatttgcctcggcaggctatgtacattgtcgctttcttccttgtcgccgtccgcgagcgcccgctcccgcgcgacgccaaaggcaagccgctcgcacggccctggcttccgcacggcgtctggcgccagccgagctggtacagcttctgcctgtcggtctttgtcggcgtttttggattcttgccgccctatgtgggtcttgctttgcggtcagtctttggccagctcttgctttccgacgctgacgtctgaccgtgctcgccagttcttcatcacgtgcgctttgtcccctgtcacagggcttctcgctgcgaagacgaccactgacggcctctgtctctgcagatcgtacacgaaggacgccatccctactttggccgactcgacctctctcaaggtctcggtcccgttgatcctgatgaacatcgtcggcggcctcggccgggtgcgtccgtcgactcattctcgtcgctgacgccgtccgtgcatgctgctgacgggcttgttcctgattggcaaacctctagatcgcaatcggtcaggtcgccgacaagattgggccagtcaacagcttctttctcgcactcctgatcggcgggtcagtccctgctagtatccgcccctgatgccctcctccagctgacattgttttgtcctctcgatagcctcgcccaagtctgcgtctggcagtttgcgcacacgtttccctccatcgtcggctttgctgttctgtttggtgagctcgaatgcctgctcagtactgacccctcgcatgctgacgaccgcggcctttgcctcggttcaggctcgtttggcggacttttcatgtcgtgcgtccgcaagacgaggcttgatgccgcgctctggctaagttgtcacctctctctcatatgccttgctcctttgccaggctcctacccgtcgtcgcggctcagcttttcggctcgaacccccacctgcctcttgccacggtcgtcggctttgcgcagctctgcaactcgcccggccagtttgcggcaggtgcgtcgagcagaactacgccaactcgacccagagcgtcatgcgccgacgaggctgacgagtcttgcgttcctcaggatcgatcggcggcctcttgcgggagacgtacggctggcgcgcactgatcctgttctctggcctgacgatggccggcggcagcaccttcatcctctacggtgcgcgcccagattatctgactcctctcccgttcggacgctgaccctcttcgctacttgatcgatcgcagcgcgctttcacctcaaccgaaaggtttgggccaaagtctaggcctcctctcgagctggcctcttaagcgggacgggacgacgccccttacatactttcgacgacagccatctcacgaacgaacgcgacccttgtagaatgacacttctggaagcaggcattgctgagcgcaaccgctagatgcggacaatgtcgacccggcagcgctcaaagacgtcgtgatcgattgcttcggccgcgatgccgccggctgaggccgccgagacgagcttgtccttgtccatcgggtggacggcgagcttggcaaacgtcccgccggacgagaactgcgagagccggccggggttgacgacgacgaccgagtcgacgacctgtaagcgaaccggtcgacagatgacgcgatggtcagctcctgccttttgtgagacggcttagtggagaggtacagactttggcaaacttggtcagctgcgaagggagaatgaggatgtcgggcagctggccgagagagagcaggctgtggtgggtaaggtcgaggttgacgtcctgtgccgcctcttgtggtaccgggtacagcgggtaaaagctgcgaacggaagagggcacgcggcgagtatcagcaccgaccgaaagttaggcaaaaagggaagatcactgacgtgcgctgcgtgaggatgctccggcagacattagcgatcatgtcgccctggccaccggggccagcgccgacctcgggctcggcctcggccgcccgcttgaagaacatgtccttccggagctggaacagcgtgtcgacggaggagacggcgaccgagacctcgttgatgttgagcacgcacggattgggcagtaagcggatgcgctgggcggcaaggataagaagatggtcagcgcaggggaaggtagcctgcgacaaccagaaaagacggacctttgccgatgcggtcccgacgtccgccttgtcaaacatgccctgcgggaagcagactgagctgccgacgaggtcccggaccgacggcacgaggatgatgttgcaagccgggttcagctcgaggaccgataggagcggcccggtgatgcgcgagcggaagatctcggccggcgtctgggtgatggcgccagctttgatgagcgggtgtgcggatgacacaaagggacccatctgtcgacggcaaaggcaggtcgtgtcagtcactcggctgccgattgcatcagggtcgccggtcacgcacgaggatgacgacgtctggcctcgagcacttgatttcctcaactagggcgtcaaaaggggcgtagtcgaggtcggcatcgagcgtgaagggtccactggcagtgatgattgcgcttggcgagcctgccagcttcgtgccgtacgaatactcgagcagttcggtcgcgggatcgcccggcatgtctggcagcggaggctgcaggagaaacgtgtcgacgtcagtctgcggtttcgcgagcagcgcaatcaaaggataacgagacgcacgacaagaatctcggtcacctcgaaccactcgccgctgccgttccggcccttgaagccccagacgccgccgacgaagaagcctacaccagcgacgcctggcgggccgccccggacgacgcagtctctaccgaagcggagcggtactcgggtgccagcgccaatgagccggctcgtctgtagcaggagcgactggtcgttgagctttgagttcgacgagtcggcgtggatctggccgacggtgtagacctcctcggcgccggtcgactcggatggatcgacaaagtcgtcctccagcgcgtacgccaagcggatgagggtcgctgtcgagttgatgcgcgaatcgatgactgcgagcgaggccgatcgaccaaaggtcagccaaggcagggggccggcgagagcagacccggcgacgcaccctctgctcgctccgagaccttctcaaacatgtagcggtacgcatagtttttcgggtcggcctgcgtcgagagcgcgatccgaggccgctttgagcctgaaggcacagcctgcgcgggggcgcgcgagaggtggggattgagcgtgtcggtcgtcgcgagggcgttggtccgagcaatgaatttgttggcgctcggcgtcggcctggtcggcagcaggggtccgaagagaggtcagactggattgaacgaaccgtctaaagaacaaacccgacgtacaatggtgatgagaaggtgccgccgttcgtcggcgtcgcctgaccaggtcgcgtcggcgtatcgtacgtcggggcaatcgcgcgaggtgtcaactggccggctgatgagccgccgagtgacggccgcacacgcttggcagccggcgtcgtcgggtcaaagtcgagcctgggagaacaggacgtgatagttagcacgtgattcgtgggtaagccgtgccacaagagatgggtcgcacaggccatccagcccgacaccgctcatgcgcttcttggtcgtaccggccgtgccggcgccaggcgtcaccgctgcccagcccgcaccggtcggggcacgcacaccagcgacattcttggcggcaagatcgcgctggaactccttcttgagctcgcgagcgatgtcgagcgtcagctttggctgggccggctggccgggcttgaacgatgacggcggcgcagggtgcgagagcaggtaggcctcgaacttgtagaagagctccgaggccggcaaggcgtagagccggaggatcgagaggcctgcagaaagacagacccaagtcagctggccatcctgctcggctaggcagccgtcgacgaggggcctctaaagcagaggagagacgcgcgcgtccaggtcggagggaaggagggaggagacgcacactcggtcatgatggcctgatcgtcgacggcagcgccaaaatgctcgcggagacccactcgggccttggcttcgtccatgcttgatctagtgtaagaatgtaaggaggaggaggtcgatggaagctcgtgagctcatccgaagctcgcccttctctcgccgcgcgcgtgcgacgcgtcgagcaatctcggatgcaagcgatctcggaggcttttgaacttgcgagtcgtcctgactgcacgaaggagagcacgtcggcgtcgaggccgacaagcagaggggtaaggtcgaggccacgagatcacagagaggaatgttgcatgatctgccaatcgccgtcgagccggcctccctcacccgccagttgtcgccccagcccccactcgtcgccctccgcaacgggtcgatcagaatggaggggtgatggtgacaatctcctcggcgctgcgatcagagacggcgatggacatcagcatcgacaagaagaggtcggacgctcaaggtgctcgactgacctcgtcggatggagggcgacggtgtcgagcaggtcgcgcatcgtcgcgcccagcttgatcgcaacggcgaagcctaccgcgtcatccgatcggtcagcctttgcgtttagggcagtcctcgaagggtgaagaagtgactgaccctgcagcatctcgtctgagctacctccgacaatgtggaggccaacgacgcgctccgtctcgccgacgcagataatctgtaaaaagaccgagagcgatgagcagccgagaaaaagcaagcaccactcggatcgacagaccttgaaggccgtcggctgctccgactcgaccgactccatcatcttgtacgccagcgcaccgaacgccgtcgtgtggcagcggacgttggcctcgccgtgcgtctcgcgcgcctcagcctcggtcaggccgaccgagccaaccggcgggtgagaaaagatgaccgacgggataaaatcgtagtcgagcttcagctcgcggaggtgcgctgggccaaagagccggcccgagagccgccggccggcagcgagcgcgacgggcgtcaggaggcgcttgcccgtgcagtcgccgacggcgtagacgccctcgaccgtcgttcgctcgaacgcgtccgtctggatgtcacctttggcattcgtcgcaatgccgagctcctcgaggctgagaccgtctgtcatcgccttccggccgatagcgaaaaggacttggtcgacctcaagcgtctgctcctcgtcgttcggaccgaccgtgagagtgacgagcagcgcggtcgagtctgttggcgagcgctcaattcgcttcatgtgcgactgcttgtggaagacaatgcccttcgcctccatctcggtcgtctgtcgtcgcgtgaggcgtgatcagcaagcgtagggagcaagtgggagcaggccgacgcacgatggtgtcctggatgaacgggtcaaaggtccggagcatcttgttgccgcggatcgcgacgtgcgtgtcggtcccgagcctgagatgatggacaacaggcatcagttcggcactcgtccacaggcaaagaggaaagcgcgcacgcgttcatcacctggctgagctcaacggcaatatagcctgcgcccacaaatagcattcgtttcggctggcagtcgagcgcaaagaactcgtcgctggtgatgccgagcgaggcaccgggaacgtcggactcggccgggacgaccggcgagctgccgatggtgagggcaacgtgcggggccgagatagcataggcggcttcgccggttggcttgcccgcgtcgtttgtcggcgtcacctcgattagactagcagaaacgagccgggcgtggccctggatccgcgtgatcgactcgcgggcaaagttggctttaacgatgctgaaacgagtgaagaggagaagtatcagccggagtctttcagatttacgacggcaggcagcacacacttacttctgctggcgctggacctcggcgtcgcggagctccttgatgcggctccagccgaatcctcctgcaagccggccgtcattgtccttgagcgcccgcgaagcctccttgccgaggacgccctgagcggcctcaaggatggacgtgacgacccacagaagtttcttgcaagcggggacaagcgatcagctcgggcgggctgcaacgcagcgatctcgaagaggctgactttgggcacgcatccgacctggactgtccgattgtcgagtcggtagagcgagagggtcagcgacggcttgagccgcaagaggctgctgcggtacgtttgggacccaccgcacgtcccgccgtagcccttcttgagctcgacgaccgccgccttcttgccgtaccgcgaggcgtagcggatgacgccagagccggctgtcccaccgccgatggcaatgatgtcgaacgagagcttgggcgttgggatgggggtcattgtctgcgagtggcgaggggtcgctcgaaggtcagcgagggcagcctccggtggaacaggggcccgccgccgcctcgccatttgtgcgaccagtacggcggcgaggcggtggtcgctagacggaccttggtatgagcagagtaggctcgaggcgttgagaggatcgaggtgaggtcagtgtcaagggagagagccagcgtcgaccttccagctgacgaggtcggcacccagcgcgcagcagcagcaggccggaactcgcctcgcccttccgacggtcagccacagccgggcgacagaggaaaagaccatggcagaggagaaagggcagaggcgacgaggcccagggtccggcgacaccagaccggggaaagcgacagacagcaggcagtgacgagaggggagcgagcagacgccgaccgctgagcgcagacggccgcgctcacttgtcgccgtcttcagcgacggccgagccgtgctgccggccccaacggccgtccgcgggcttggattggccggcgttcttcttccaggccggcgcccaattcgaggggatgagcccttggtcgcccgacaacgagaaggcgctgctgccgccgccggccgaggtcgccgtcgtcgcgttcgaggaggccgagggcgaggttgagaggaacgagttcgacgagccgccgtcgtccttgtccttgcgtgagaagctcgagcctagagaagagccgaggccgaagaagcggctgacagcgggcgaggtgcgagcagatcgtcagtagaggccaatgatcaaggcgggtgcagaggaaagggccgcacctgaagctcttggtccgcgtgcgcgtctcgtcgaggctcggccgcgcgggcggtgcatcccaggcggcggccgccatcagatcccggttgaggtcgctcgagctcccgtgcggcgtgttgaagggacttgcactccgctgctgcgaaagccgcgggccggtcgcgtagaagggcgcgccgccggtcgaggacgccggtggcgacggcggcggaccgtgcttggagtcggagcctcggtcagttgcgtcgagtgagcggttcgagccattgttctggcggagtgcgcgcgtgagggcttgccgctcggccgcgctcggcgcaaacgcccggatcgacgaaaagaagcgcgagccggcgccaccgccgggcgaggcgccgtacgagctcgtcggcgggccggccagcgtcggcgggacgagcgactcggacgacacgcgggctgagccgaggccgccgccgacgtgactgccgtggagcgaggggacgaagggcatcgagttgggcgagaggtcgctcagggccgagtgggctgccgctgcttggagagcagcggcgctggcaggtactatccctgagccgctgccgtggccaaggacggaggcggacggggtctgggctggctgctgcggagacgttgcgtgggttgggtggtcttcggcgccctcagggccttcgagcaggaacgagcgcgggtcattggagaagacggagcgggggctcgcaggcagcatccggtcggaaagcgtcttgccagcggtctgatgctcggcgccatcggccgcgtcgccggtcgtcggactgccagcggcggcggcagcggcggtagtctcgccgtccgagtcgccctcgccaacctgaaagtcaaagagggcgccccgtagcatgcccttctctgggtcgggcgagagcaggccgtcggccgtgagcgactggaagaggccgcgcgggaggaggtccgtgaatgaggccgacatgacgttgggcgagctgagcatgtcgtcctcgctcgagtcctcggcggcagccaggtgggcaaacggcaggtgcgacggagcactcatgtagggctgattcttgacagaagcggcggcggcaaggctcggtttgacagaggcggcggcagcagcttgaaggctctcgcgcgacggggtcgagtagcggttgagcgtccggggctggacgccgggcccaaagtcctcgaagccaaagacgtcgttcagatgcgagcccgatggcgtccggccggtgtggccgtaccggccgttcgggccaattgagctgccgttgtgaaggctagcgcccgctcctgcgtgggtcaggggcggctcgttcggctgccgccggcgctgaaggaggctgagcgggagctgctggatcggaaggtcaaagatggatgaggccgggttgggtaggctggcgttgacaatgttggacggcggctgcgagtgggccgtgtagaggtccgactcaaccgtgcgagggcggaactggccggcgccataggtcgagtacgaggccatgagcttgcgggcctcctcgagctggaagacggcgtcgtgcttggcgtgctcgagcgactcctcctcgtaccggacgagaccctcgagctccttgacgtcgtgcagcatttcgccgacgcggacctcggtcagcgcgagcttcttgcgtcgcgtcgccgtttcggcctggatctcggcttcgcgcctggcgacggtcgccgagctcgcggcaacctcggcccgctggtcgcgcatgcgctcgcgcgcgccctccatctcgcgcgtcagctcggcaatgcgcgcgagaacggcgtcgcggagcgactcggcatgcttgcactttttgtcggcctcgcgcttagccgcttcggcctggcgcttgctctcctcgagagtcttggttcttgccttgacctcgagccggtcagcatcttcctgggctttgcgcgagcggagctcctcgatcgtctgctgtagcgaggcctgtgaggcaaccgaggcggccgacgactgcgacagctgcgcgagcaggtccgtcgtcgccgcctgggaggctgcaagcgctcgatgaagctcgccgagcggcgggttggcggcgagcacggctggctcgatgtgcggcagtggcggaaggctcggcgggtggtcgaccgaggcggatgggatagttgtcggcccggaagcaggttcaggttgttgttgcgggtccggaagagaagggggggttggtagtacatcagtctttggtgtggtcgtctttgcgggctgcggcgggtcagcgacaggcggaggccggccgctgctatcgtcgaggcttggtcgacgtgagcgcggtcgggctttggcagaaagccgggcctgggcctgacgcggggacggcggtggcgagtgcgagtagggcggaggcagctcgagatcgaggcccttcttgtgcagcactagcgtagaagcggtttgaagcagggtcagcgacgtgagatcattccagtcttcgcagctgcagtgggacgcaccggcagcgacagcatcctcgctcccatcgagcgccttgacatccttgacgccgagctggggcggcgcctcagacgcatcctttgcgcctcccgtcttgtcgtctccgagccccctgaaagcgcccatgagccaccagcgtccgaaagcgccgagaaaccagacgccggcgagcagagcgtcgtgttcggtcggctcggcgagccacttgcgggcggcagtcgggccggccgcggtggacggctgctgggcggctgcatcggctgggacggcgacgatcgagaagaacccaaaggagtggaatgcgtagggaggcgtgcggagcgagatggagacgcggttggtgaagcggaagggagctggcgacggtgaaacctggacgtcgccggaggccgagggcgagcttccagacgaggtggtggcggcactggcagccgttcgagccggaccgtcagaggtagacgacgagccggcctggctgctgtgcttagctgaagatggcttgagctggcctggcaggccgtcgtcgccgtcgtggccggccggtcggtgaaggtcgcggagatggcgtcggaacgagagctcggtcaggaacgaccggaaggcggcgtcggttgggttggtcacgaaagctggaagcggcgaaagagcagagagtgtcagatcgacgctgcatggcagacgacttgaccaaggaagacgggggacgcacccagcaggccgacgaggacgagcaagcctgcccaaaagacgaggtttcggacgcggtctccgagctcgccgccgagcgcgccctggccgaggccgagcaggaggccgacgtcgtctggtccctgaccgaggacgagcctcggcaggaagccggccataagcccgagcgcggcgtaggcgacccagcccatgagctgccggggccgggtcgtcggcttggggcggcggcggcggcggtgcgcggcgaggacggccaacgagggcggcggcggcgggttgtcgccaggttctgagggcttcaggccggttgtcgacagggtggggaggggaggcaggaaacgtctgcagtcgcgtgccggaggagacgtggcggaacagaaggtcgttgacgagggcaaaggggatgacggaggtcgagtttgcgccgggcgcgcgaagcaagggagaggaggagcagcaagcagacgagtcagcccgacgagcacttgcacagtagagatcggcagccagtccggcggccaatgagcagctcgagacggacctgaagaggatcggggcttttgcgttcgcctctttctttgacctcggggtggttggcgagaacggtacaagggcgggaccacctcgtcgctagcccttcttgctctcggggctgccggcgagcccgaagttacgccccgtgactccgaggttacgtctgcaggcaatacccgcttcagcccgcgcgcccgaccgaccgaccgaccgaccgaccggcctgtcgccacctctccttacaccccatcaacagcgttccagcaagcatggccggcaagcgatcgctctcacagccgacgttcaccgatctcggcgcgcgcaagcgtcaacgagcggaactcgcggataccggcatcgttggccgccagcagccgacggcctacggcctgctctcagacgagctctggctgctcgtctttgcccacctcgactttggctcgcttgccgccgtcgagcgggtcgaccggcactttctgcgactctccaacgacggtcagctctggaagtcgctctacctcggtgcgctgcgttctagccggctgacgggtcggacgatccaggctgacgacaggcgatgctgtccagggctcgatctccacgcgcgcagcagcagcggcagcggtctcgacagcaggccctccccgctcgtgaaggagatcgctaccctcccttcgcgagcggccacctcgacgccatcgaccgaggccgtagattacaagcacctctacagggtgtgacgcgcccggaccaaggtggcgacccgcagcatgcctccgactgactcagcgcccgccctccaggttcggaccaacttctctaacggtcgctcagtccttacatcccttccaagcacgccaattattgcgcgcaccgcatctctcccaatcaagctcgagagcgggctcacggagctttcgtccccgaccggcaaaagcgaacgaccgtcgacgacgacgctactcgtccttgcctcgccgtacatcgtcacgtttccaacgagcgcgaccagaggcccaccttcaggaagcgtctttcgcgccaaggccggcgccgcctcgcccgatgactttcgagcgggcgacgcgctcttgacgttcacctcggccgggctcagcctcgagcggcagcgccggtcgctcaagctcgacatccgaccgatcgatgtcgcgctagatgctcgtggctgggtcgctgtcgacgaggtcggcagcagtcgggcgcgctcgattggcctctacgtcggctggtcgtctggcgccttctcgctctttgccatacgcgactcggcctcctcctcttcctcatcgcaagctgcggccgtctcggtcgaagaggtcttcttccagccatcgccgacggcatcaccgctccatctgacagtcggatcggcgctctacggtccgttgctcgtcaactgctcagaccacttccggctcagcttcttccacctcccgggagttgccggccccgactcgcgtccggccgaaactgccaaacctcaggcttcagctaaggagctccggccgttcagatcgctccggtcgctcacgtcttggcacccatcgacgcttcggctcgccgcctgtcccttggccagcgcgcccgatgccgtcaagctcgcagtcgcgtacgccgtcccgtgctacccggatctcttttccgtcgccaggcaagaggtcgtcctccggccctcaagatcgacgatcggcggcgcgcgctgggactggctcggagaccgctcgctctcggcgctggcccctaccggcctgggcgccttctggcagcagccctttcaaacgacgtcagcggccgatggcgatcgcccgactgagctcgggacggtcggccgtgtgagcgccgttgcgcaggacgaccgatgggtctgcctcgccggcgaggacaatgtcgtccaggtgttcgaggtccccgacgcgccaggcgcaactcggctcgagtggcggcagacgctctgggcacacagcgcgggcgtgacggccgtgtcggttcgacatggtgcgtctgacgtcgtccgatagtatctgggacgcctggcagaccctgactgacctgcccatcttcaggacgctgcgtgacggccgactcgaccggccggctgctcatctgggatctcggccagctcgaccggcccaggccgatgtcgcccagtgcagtcgagcctggtcttcttccctcgccaccatcgacaccactccgaatgtcaagctctgcgccaacagtccgctcctcggccggctgggtcgaggttctcactcctcgacagacgacctcgccgccccttcccgactccgcagcgcccgtgtcggcactatccacttcgacgtccagaggagagcctagcctctggacagacctccatgcagctagcaccggccgagggagcgagcgcatcgagctcgtcgttcaggacggcgagcgcatcgtctcggtcggcgtactgcgcgaggctgccggcgacggcgacggcgcgggccgggtcaaggtctgggcgttcgacggatagacgggcaggctcttcccgggtacaggggggcgttcgctagaacatcgttggatgtcatgctcgaattgaagtaggcctccagaacagcagctgtcgtcatgccagagtagccgcagctctctctcgcccgcagtcgacgaccccgtcttgccctcgtcgtcaacctctgcccatcaactcagcatcccagcctggactcggcatgcgacccagcctgtcagcgacgacgacgtacacgacctcgacgtcctgaagcgaccatctgcgctaccctccatccaccgacggcctcgctaccgcgtcgttgcttcgccgatggcgaccgccttgcctgtcctcccgacgacggcaggcccttccttcacagcccggcactcgcgccagccgtcacagcacgtttcagcgccgacgccctactcgctcgcgctccggctcgcccacctcgtccgccggtctgtgctcgtccagctcgtgctcgcgctcgccgtcgtcgggctcgtcttccggccggtcgccttccccacctcgggcggcgccgaggccagtcagagctggggctacaccacctcggacggcgtgcttgacatcggaggaggcggagaaggaggcgccagcagcaaaggacgtccggtcagcaagcacggcccgaccaaggaggccgaggatggcagcatcggcgttgccgtcggctgggatctcgacggcgtctaccgcgtcctgacggccggcgtcacctcgatccgggccgccggccagggcctctcatccctcggcgtcgcggccgacgagtcatttcagctgcttgagcccgacgcgcccgaccagtactgggcgacgctcgagacgtttgtgcgagaagcggcgctgccttcagcgctcgaggcgcagctactcgccagcctcgagacgtacggcggcgatggagcagcatcgtcggtcagcgcagactttggtccaggcatgggccacttcaaacagatctggcagacggccaagcacgatcaggcgcgtgacaacggcggttggacgagcataaacccaggttgggcctggtcgctgctcgacgacgccgaggctgccgtctgggccaaggacgtgctcgacagccgagtggacaacggtcagccggctgccggtctctggggcacctggcaaaagatgggcgagagtgggaagggcggcatcctccggagcgacatgctgcgctacctacttttgctgtgcgtctctcccctctggcttctgcccctggcccctttcgggttaagctgatggtccagcatcccctctgccgacttgaaataggatcgagggcggcgtctacaccgataccgacaccaactgcctcaaggagatcggtcgctggggtcataatccgcgcatcctcttgtcaaaggagccgcggtcgcacgaggcagcgagggtcgtcatcggcatcgaggccgacgtcggcacgcgcgaagactggcacgaggtgcgtacaactcatgtgacggggacggtagcacccgcagggactgacgtcggaccccttcatctcgcactatagtggtggcctcgtccgcttcagtttgtccagtggacgatcgccgcctcgccgcatcacccgatatttgtcgacgtcttgcgccggatctcccattcgacaacccgcgcttttgcgtggcttgacgcgcgtgcagcgcttgcggaaaagttgcgcaacgagggcgactcgagagaggccaaacgggtcgaggcgctcagcctctttgacgtcaagggcgacgagggcgagagcgagcgggcgctcggcgtcggcgtcagcgtcatggagtggaccggcccgggtgtctggaccgacagcgtcatgagctatctcagggccgagtatggcatttcttggccgattttcaaggacctgcatcgtgagtacgcgctcggacgttatcgctgcccggcgcgagaacattccactgaaccagcgcgctcgttttcttctcaggcccgctccgagtcggtgaggtcgccgtcttgcctgtgactggcttcagccctggcgtcggtctctttggcgctcaagccaccttcgacgccgaggcgatggtcgagcatcagttccgcggcagctggaaggacgagtagtacgggaccccctttttgcacccagtcaccaaagcggcggctctgtcgaggacaggatcatctccgccgcaccgccgtcacgcagccggccaaaattggtctgtaggtcttttttgcatacgcagcaacgtcctcgcggcggccgacaaagaaggcaggcgcgtgggcgtgctgcgcgcaaaacgacgtcgcgcctgctcgacagaagcgagaccctgccctcttcttcctcgtcagcactgtttgagtggcgagcgtcgcgctctgaatgaaaaatcttttggatatcggcagctctatcgcatgaccccgacgacgagcctggcggcggaggagggatgacctcggtctgtctgggctgtcgcaccaccaccgccgccgccgccggtcgacgccagctttcgacctctgcttgctcctgccgccgaccccttcctccttctccttcattctcgctcgcaaaactccgacggcctcaggaacccgccatctcgtacctccgtatcgcagtaaaaagaacgtcacgacctttccctcccgtcggctggccgaccctctcgcaaggtgcgcccggcctgttgcttttgccccttgtctaccctggccggcgcgtcgcgctagcccagagcgctagccaagagtcaagctcgcaggcctcgctgcctctgcccgacccctctcctgacatcttcgctgtcggtttcctccagcgcctgctcttctgcctctcttgccgtaccgtgccgagctcgtcagcctccctcgaccaaccgatctcgccagcgccccgtagcctgccgctcaggccgctctccctttcagcaacccatcgcgaccgacacggcctctgctgtctgaagcgtgctccttcgctcgccagcagttgctcgttggacatccttgatcaggcggcctagccttctctctcgcgcaatacggccgtgagccatgtcgcgaccgcagtatcagcagcagctgtcctcgtccgacgcggtcgaccgctttggcttcccgccgccgccgccgcctcctccgcctccgccgccgacaatctcgaatggggccggcctcgctcaccgggcgacgacgctccggcggggcaagaccctgacccggccagaacgccaggtggcggccgcgccgctcctcacgccgccagcaccgatcctgcccggcgtcgcgcagctcgtgccggccaacgccaacgccgagcgactcaactggtggatcgtctgctcgttcatctgcaccttctgggctccgccgagccttctctcggcctgcggactcaaggacacggccacgcgccaggcctggcgcgagaagtttgcgctttgcacgatcgcggccgtcatcggcggcatcgtcgccttcctgacgatgggcctcacgcggacgctctgccctgagggcgacaaccggcggcagaactcgctaattccgcttggaaaaactgagggcgtcgtcggtgtccgaggctgggcggtcaacgtcagccggtcagttgtaacgagctcggtcaacttttacgacatcggccgcagccagtcgggccaggatattaccaacctcttcagccggagcgccggcgactacccggcatgcgccggctttagctcgcgctttgcgacgacgccgctgtgcgatgccacgtcgtgtccgctgccgcagctgtcggccgcgacatttgactcgctcaagctcgtcaacacgacgcagcagattggctactcgtgggccaacgtctcgtcccaggccaactttctcgtcatcgacggcaacgtcctcaacctctacccttacctccggggcaacccgattccgatcgccggcgacccagtcgacgccatcatccggacggtcgccgggcggaaagccggcgggaaggacgcgacgcgactcttctacagcagtgccgtccctcagcaggccgtgccgtgcctcatcgaccgctactacgccggccagatcgacaagatcacgccgggctgcatgctgtcgacgctctttctcttcctcagtctcggcatcatcctcgccgtcgtcttcgctcgcttcttcatggcgtggatcttcagctggttcatctcagcacgcatggtcaggccgcccaagcacctcagccggagtgccgtctcgcccatggtcatgccctcggccggcgccaagttctcggtcgacgccccgggcgggacggcaccctggcgcggcggcaccgtccggcaacggccgacgaaaggtggcggccgagcgggccggtcagccggtggcggcgatgccgcactcgcccttccggacaagcctgcgccgctcgtcactcagacgcagatcggggccgagctctttgccgtctgcctcgtgacgtgctactcagagtcgctcgaatcgatcaagggcacctgcgattcgctcgccaacacgacgtacgccgacggccgcaaactgctcttcatcgtcgccgacggcatgatcacaggcgcgggcgaaactgtttcgacgcccgaccactgcgtcggcctgctcgaagccgacgagcggttcggcaacccgctgccgatgggctacctggccgttggcagcggccgcaagcgcgagaatcgggcgatggtctatgccgggcattatcgtcggtcccttgctgttggcctccggcaaccattcatcaaactgatctctctccctcttctgcctctgcagtctctggctcgggccgcgatgcgcaccgcgtgccgaccgtcgtcgtcgtcaagtgcggcatgccctttgaggcatccgaaaacaagcccggcaaccggggcaagcgcgattcgcagctcatcctgatgaactttttctcgcgcgtcacgtacaacgaccgcatgtcgccgctcgactttgacctcttccgcaagatccaggtcctgacgggcgtcacccccgacttttacgaggtctgcctgatggtacgtgactttggctactcttggtctggcctcgacctttcgctgaccgtcccggctttcgtaggttgacgccgacacggtcgtccaggaggagtcgctcacccacctcgtcaatgtcatgcaccacgaccggctcaacatgggcgtctgcggcgagacgcgcgtcgccaacaagacgcagtcgtgggtgacgttcatccaggtctacgagtactttatctcgcaccaccaagccaaggcgttcgagtcggtctttggcggtgtgacgtgcctgcccggctgcttcagcatgtaccgcctcaagagccgcaagctcggcgacgacgactggatcccgatcatcaccaaccccgacatcatccgcgagtacgcccagtgcgaggtctcgacgctccaccagaagaacctcctcctgctcggcgaggaccgcttcctgtcgacgctcatgctccggacgtttccaaaccgcaagatgctcttttgcccgcaggcccggtgccggacgatcgtccccgacaccttttcggtcctgctctcgcagcgccggcggtggatcaactcgacgatccacaacctgatggagctcctgctcgtccgcaacctctgcggcaccttctgcttttcgatgcagtttgtcgtctttatggacctcatcggcacggcgacgctcccggtcgccatctgcctgacgggcgcgctcatcatcaactcgatcatcacgccgccccaggtgtttagcgacgcgatcccgctcatgctgctcgccatcgtcctccttctgccggccttcctcgtcctgctcgcgaccggcaaggtcgtctacgccctttggctcgggccttacctgctggccctccccgtctggaactttgtcctcccggtttactcgttctggcacttcaacgactttacctggggcgagacgaggtcggtgccagtctccgctggtggaagccttgaaggtcatgcctgacgcgtcttccccctttacgccgctcacccacagaaaggtcctcggcgaggtcaagggcgccggccacgccgacgacaagacggagctcgtcgcaagcgtacccctccggcggtgggaggactgggagcgctcgcggttgcgccggatccggcgcgaggagcggcgccagcgcgacctcgagcggctcaatcggacgttcaacaatggcaacccgcgcaacgacggcggcggcagcctcgcgccctcgtcacgctaccactccgagtacgacgcctcggacacggcctcgacgctctcgtccaacgaggacgaccactggggtcctcagattggcacgtacaacgaaaataacgctctctatccgccgccgccgctccagtttggcgccgatgtcgacagcgacggcgaggtcctcgacggctctgacctcgaggccatgctcgaccagggctttgacgacagcgcgccaacaccagtccagcgcggccagacggggccttacaacgcgcttggctcctcggcctcgctcacgcacatgccgccaaacggctcgacacggacgttgaccggtccgcacctgccgcgctttgcgctcaacgacggcccgccagcgccgccgccgccgacacgggcgggcgggtacgccaacgcccacacgtacgagcctctcgcaaacccgcggcactcgccgccgacgccccttccgaacccgtcggcggccggccaggtgccggcctacccgacctcgacgacgacggcgtatcagaaggccggcggcgggcatgccaagcagcggtctgtcagcggctcaaagaccgccgccaactgggggccgggcggcccgctcatggccccgccggccgaccacgtccacgcgtcgccctcatgaccgttctctcttcgtcgacactactccaacctcttcgcactctgcttcgacgccacgatttccttctctctttcagcatccctcgcacgcttcgccccgcctcggaatagatctcctccctcttctttgcttcacccttcgtcccttcgctgcactaccgcctttcccttttcgcccatcaatgccgtcccccgcatcggtctacgaacactcctacaccccgaatctccctaacgacactcccccctccctccttttgtactctctccctctctcgcgagacgcccctgccggacggccgccgcccagccacggacccggccaccttttttccatcgcctgcaccggtcccccttttgctgcagcgcgcggcctattgcgctgcccgcgtgcgaccctccccctatgctcctttgctctcttacctgcgcttttttgggaagtagcgcgcgagcgtgggcgggccgccgcccggggcgatcgacgaaaccgtaatcgaatcggctccccagcaggagcggcgcgcagagccaagcaagctcgaggagaaggagcaggcttgagccacctcgcccctaccagcccttgccgacagccgtcctcgtttgcttgtcctcttccttcgcccgcttctcaagccagtctctccccgacgcacgagccggctcggtcatcacctctctcgcctgcagcttgcgcgcgactcagtcgccccttcccgcccgcctccttccctccgagccgaaagcagcctcgcgacccgacgacgcgacggaccacgggcgagacgccctcccgcctgccgctcgcacacctcgcctcggacgggagcccgacccaactgcgacagaccgggcccctttctgcatcctagccgtcaactcactcgtccgagcgacatgacgctcacccaggcctttctcgtccggcgcgtcctgccgaccgccatcctcctgcttgtcgcgctcggcctcctctacccgttcgccgagctctcgccgctcgacgtcttccgctcgagcttcctcccgcacgccatcaccgactcgtcagcagaggcagacggctcggaccatcagccaagctcataccacggaaggcatccggtcgtcggcggcctgctgcacgtcgacttgagcttgccggcagacgagcacccgatccgccagctcatccacaacgccaaggtcgactgggagcggaagctcgcccgccagagcaagacgctgtctcaggccgtgcgtgagtacaaggtccgaaaccagggccgcaacccgccaaagggcttcgacaagtggtggtcgtggcgcgagtacgtccgcagcgactgctgttcccgacccgacaccttgcccaagcgagcctgacgctgacctatttgcgcccccactttcgtcgctttgctccatctctaggaagagtaaagtccagctgccggacgagtatgaccagatcatgacggatctccggccgtaccgcggcttttcgcccggcgagctccggaagcgcatcaagcacctgcagacgctccgcgacaccttctcgatgaccaacaaggccggtcagctcacgatgcacacgcggaggtatgacaccaacatcatgggcgccgacgaccgggcccagggccagtttgactttatcaaggacgtcgccaaggacatcccggactttgaggccgtctttgcgatccacgagtgcgtcccctcccggctgcagcgtctgcctgacacgaaattgcaactgacaatgccgctctcatccccagtacgccgacgcagtttgtctcgcacgcgcacctgatggagcttcagacggccgacgaggagggagaatgtgcgtttcgtcgacccggcctggcgcaaggaacagcctgacctcgagcgctcgccttctcagatttcaccgaggaggaaggcgaccggtccttctcaaactggggatcagcttgccctcgtacgtcgctggtcgctgaggagctctgctgggctggcgctgatcccatgcccttgtcacccgcctgtatcggcccgattttgcagctgggacgaagctctacaatgtctcgatcgaggaggcgatcaacccgacgtcgtacgacccgacctacaaggacgacctgaacgacaagtttgactacattgcgcccggctggaagccgttcaaggcgacgcggccagatgacctgaagccgccgccccacccggtgccaggcgcgcgcaagagctttgtcgcgacggacgaggcgatgctcaacctttgcgacgagcccaacctcatccggctccacggcgcgctcaacggcttgcatccggtgccggccccgcagctctacccaatcttcagcctcagcaagaccaacctccacgccgacatcatggtgtgtgcgatcccctctttcgccgacgccggcaaatttcattgtggtcgctgacgactctggatcctcccttcaggtcattccgatcgaacagtggagcgaggacgccggcgccatgcactggaacgagaaggagcggggcaagcttctctgggtgcgtctggccgctgctgttcccaagacggctttctctctgactcgccgcctcatgcgctcgcagagaggacgcaacaccggtggttactataccaacagcgtgagtgtagtcctgacaggaagcaccagaaggagttactgaccctctctcaccgctccacccgccctctttgcgcctcagaccccgtggcgctcctcgcatcgcgcacgcatcgcacggatgaccgactacgacatccagtcgtcggtcgagctcatcccgccgccaaagtggctgtcgacctatgtccggccggccgggggtgagatgagctcgctcgacattctcgggacaatcgccgagtatgaggctgcgtcggccgcgagctatgctgcaagctcctcgaggagtgatgacgacggaggccgagcggccgaggcggctgccgacgccgtcgccgagcggtctctcaaccggcgcgtcggcggggatatggccctcggcgacgtcatcatcaacctcaatcagggcaacctcaaccgcaagctgtttgacattggcctctcgtacgagccgattcagtgcgacgtcgaggacgggagctgtgccgccatcaagaacgagctcccgttccgcgaggtcaagacgttcagcgaggagaatcactatcgctacatcctcgacatcgacggcaacgtgcgtcgcccggcctgccctttggaactgtggtcttgtcgactgacgccgctttctctggctccctcgcaggcctggtcggcacgcttccaccgcctgctccagaccaactcgctcatccttaagagcaccgtctacccagagtggtggaaccagcggatccagccctgggtgcactatgtgcccgtcaagctcgactttacggacctctatggttcgttccctcgcggccttcgcagggcgtgccgtcactgaccgcttccaagcaccctttctggcctgcagacatcatgaccttcgtcagtcgcggcagaggccagctctttccgccgtccttccttcctgactcgatcgcctcttactttacagttccatggcgacggcgacgagggcgccctccctggcgaggaattgatggcgcgagccattgccgagagcggtcgcgcgtggtcgctctcgcactggcgacgagaagacatgacggcctatatggtgggctctcttcctctcctttcagccccagctcctcggtggctgactagtagcatttctcgcagtatcgcctctatctcgagtgggcccggctgctcgcccctgaccgctcgtcgatggactttgtcctggacgagtgaaaaaggcccctcgcttccgccttaacaggccctgtcgttgttctcttgtcaagtctgtagatctcccacttagacctctcctgttggccatcctgtcccttatatttgactctcaggcgcgtgtactgctatcactctcatatcgcttttgcgaagggcgaccttcttgcgggagcgagagggcgggaacacgggcggcttgcaactgcgcgtcggcgcgtcggatcgagcagcacgacgacgacaggctgcccgacgacgacacggccaggatcgccaagcggagcaaggtcgcggtcggagggctggattgcctggaggtccagcaatcagtcgcgggaccgtctcgcccgtaggcacgttgctacgagccgctgccacccgtgatactcacacgggtgcccactccgccaccaccttcaccacctcctccccctcctcttcctcctccagccccggcggtcaccatcgtccccctggcgccatctaacgtcgagtacgatgaccctgacggtgacctgatcatcgtgtcaaaggacggcatctggtcttgcgtacggaccgtcaaactccggggcgggtccaatgtgtctgacccaaagctagggaagctggagcccgtcccgtcggccaaggccgtccgcatttggaaaactagctttccttcgaattcgctcgggcaatggcttcattagcttctggttccgacaaagaatccactgaacatcgcttcgccacaggtgagtctgctgcaggccgttgtgcaggggaaaggctctttgtcggtcctgatcagggttgttatctttagtgttctcgaaccagctaagaaccttcggtcgccgcaagtgactgcattgatcctcgccctgctgcatgccaagattgatcggcatgcgtcgacggtcttcgccttggcctgcgtacactcagacctcgggctcgcccgcgctgcgctatccaacttttacaccgccctcactgtccatccaaagcccgacccgttcggcccgggccctcacagaacggctttcggcatcagcaggacgctctttggcttattcccgccggcgtgcgtcttcaacctgctccagagcgtgcagcaggcattacatgtcgcgccgcgcgacgcgcccgagctgtgtcggcggttgagcgaaacgttcacggtgagtggccctcatcggcggcagcagaccatcgcaacgagctgacccgccttgtgacgccacctgcagtatacctagtcagcgtagcgccataattgatagcatggcgcgtccacaaaggcttaccccgcctcgccgcaagaagccgagttgagtagggcacacagttcccccccctctcgtcgtcgtcggcaaggccagtgagaagtccattacaaaaaatctagcccgggtcacaacgttttctcgacaccacaccacagccggccctcgctcctgccagacacagtacgcacgcactacgagcagaactcgcgggcgttctggaagatgcggaaccaggggccgaggccgccgccggcctccttgagctcggccggcacccagctgttgctctcgagcgcaatgacgcgctccgggtggggcatgatggcgagcactctgccgttgggcgtctcgacggcggcgatgccgtcgggcgagccgttcgggttgagcgggtactgcgtcgtcggccgaccagcggcatcgacgtactggacggggacgacgcactcggtggctgaggccgatgaggggaaggcggcccggccctcgccgtgcgcgacggcgactgggatgacggtcccactcatacccttgaggaagactgagttggccgaggccgtaatcttgacggtcgagacgcggccctcgaagcgctcgctcttgttcgtcttgaaaagcggccacttttcggcgccagggataatttcgcggagctgcgagaagaattggcagccgttgcagacgccgagcccaaacgtgtcgtcgcgcgagaaaaaggtcgaaaactctttgcgagccgtctcgttaagaaggaccgacttggcccaaccgttgccggcgccgaggacgtcgccgtacgagaagccgccgcacgcggccaggccgcggaagccggcgagcgagaagccgcctgcgatgatgtccgacatgtggacgtcgacggcctcaaagccggcggcggcaaacgcaaacgccatctcgacgtggccgttgacgccctggtcgcggaggatcgccaccttaggccgcgacgactggccctcgggcgacggcgtcgggcaggacggcgtgtcgagcaggggcaggaagggcgcggtgacgttgtagcggaggcccgacgcatcgggtccatcgaggatggcgtcaaattcctccttggcgccctcggggttgtcccgggcggcctgcatcctgtacgacgtctcagaccatatctgctgcagcgcgccccgggtcgaggcaaagacctcgttgccgtggtggatgatgcggatcgcctggtcggcggccgaggcgttgaccttcgcgacgacgtggatgtcccggtgagggaagccagccttgtcaaagacctcggtaaactcaaagaatttgtcctttgccacctggaagacggcgccaagctcctcgttgaagagggcggcgaccgggagggccggcgtcggctgcttgtcgaggtcgtcgaggtcaatctcggcaccgacccggccggcaaagcacatctcgacgatcgaggcgagtaggccgccgtcagaccggtcgtggtaggcgaggacggtcccggcgtgctcgtccttgagcacctggacggccttgaagaaggccttaagcgtctcggcgctctcaacgtcgggcggggtcgagccgagcgtcttgaagacctgggcgagggccgagccaccgagtcgctgctggccggcggcgaggtcgacaaagacgaggaccgtctcgccggcgttcgtctgcagttggggcgtccaagtcgccgagacgtccttgcacgaggcaaaggcggtgatgatgaccgacatgggcgaggtgacctcgcgggcctcgccctgctcgttggtccacttcatcttcatggacattgagtccttgccgacggggatgccgacgccgagcttcgggcagaggtccatgccgatcgcctggacgccgcggtagaggccagcgccctcgccggggtgcgaggccgggctcatccagttggccgagagcttgatgtgcgaaaggtcctcgatcgacgaggccgcaatgttggtcagggcctcgccgacggccatccgggccgaggcctcggggctcaggagcgcgagcggcgtccgctcgccgagcgccatgctctcgccgtcgagcacgtcaaagccgtacgacgcccgggtgacggccacatcggcgcaaggcacctgccaggggccaaccatctggtcgcgcgtgacgagaccggtgatcgaccggtcgccgatcgtaatcaggtacgacttggagccgaccgaaggcaggtgaagaacgcgctcgatcgcctccttgagcaggccctcgggcgcgctgacctcgggcaggtacgactggagcgtcgcgtcaaagtcgatccgccggggcgtgaccgtcgttgccgtcagctcgagcttcggcggcttgccgaacagcgtcgacatcggcaggtgaattggctcggcgccgagcaggcggtcggtgacgacgagctcctgctcagcggtcgcacggccgacgacggcgtaagggcagcgctcgcgcttgcagatggcctcgaagacggccagcgtcgggccctcgggcgcgatcgcgagaacgtagcgctcctgcctgcacgagtcgaagcaaaggcgtcagcaagggcgaggcgagggataccttccagcggccaaagacgtacgactcgttgcaccagatttccatcgggctcatgcctttatcgtcgacgaggacgtcgcggatctcgaaccggccgccgaggttcgagtcgtggacgagctcgggcagggcgtttgacaggccgccggcgccgacgtcgtgaatcgactcgatcgggttgctctcgccgagcgaggtgcaggcgtcgatgaccatctggcaccggcgctccatctcggggttctcgcgctgaaccgatgcaaagtcgagctcggccgaggacgcgcccgaggtcatggacgaagctgcgccgccaccaaggccgatcagcatgcccggcccgccgaggacgatgatgtgcgagttggtcgggatgatctttttgatcgcgaacggcgcccggacgttgccgagcccgccggcgagcatgatcggcttgtggtagcctcggatttcgaccgcgtcggccgcgagggatgtctgagacggcacggcgagcgagagcgttcgccagaagctgcacgaaggccgggacgagcaggaagggtcagctgagagagcgttgtatgagctcccatccgacgaaaggacgcacccagtcaggcccggccggccaaactcgttgttgaaggcgctgctgccgagcgggccctcgatcatgatgtcgcgcgcgctcgagacgtgggccggcttaccgacgtggtcagcgccggtcgcgccctccttctcctcccacggctggcggaagccgtcgaggttgaggtcagacgtcatgaagccggcgaggcccatcttgggctttgagccccggccggtcgcgccctcgtcgcggatctcgccgcccgagccggtcgaggcgcctgagaagggcgagacggccgtcgggtggttgtgcgtctcgaccttgatgaggatcgggtacgcctgcgggctcgaaaggacgtagggcgacgggccggcggccgacggcgaaaagacgcggatcgcatgcgagtctgagttcatgacggcggcattgtctgaataggccgagagtgtgacgtcctggttcgtcgccagcttttccgtgttgcggatcatgccaaagagcgagattggctggtcctcgccatcgagcttccagttggcgttgaaaatcttgtgccggcagtgctcagagttgacctgggcaaacatgaagagctcgacgtcggttgggtttcggggcgggtccatcgacgtgtaagcgtcgagcaggtacttgagctcggtcggcgagagcgcgaggccgagcgtcgtattggcgtggacgaggaggtccatcgccgacggtgggtgcgaggcgtcgcccgtcagcgtcgccggctggacgtcggtcgtctcaggcaagatcgcgacgtgcttaagcgggcctggcggcgagacctggaagatctgcgccttggccggcggggcgacgaggatagtctgcgtcatccggtcgtgcaggagcgggcttgccgcgggaacgaacgcgacggcgtcgaccggcgaggacgaccggatcgtgacgacgatgccgcgctcgacccggttgaggtggctcgcgaggccgcacatgcgcgaaatgtcggtcgccttggacgaccagggcgagatcgtgccgagccgggggacgacgtagatgacggtgtcactctcgccgctggcagccggagcaagcgccgacggctcctcgccgtacttgaggagggcgtcgagcacgacgcgctcggtcgagctcgaattggagaggagcgcgagcgattcggccgaggcaacgtcgaccaggtggaggaacgaggccgagacggccgtcacgcccgagtggagtacctgcaggcttttgagcagggccgccgccttggacggtgagagcgccggcgagccggtgagcgagaggctggggtagaaggaaggacggcggcggcggcggcaagtcacgacgagcgaggcctgtcagtcgccgcaagtcgctctggctcccgtcacaacacaacgcagcacgcacaggtcggccattggtcggaagagcgtgcaatgcaagggctgaggctgttcagaggatccctccggagtggggaggaggaaggaggttggcggtcgacgagggaccagcgacagccagggctcgagtcgtcggcggcctgcgccgaactgcgggcccaatatttcagactccgactctgactgccgtcgagtcgagcacgtcgactgtcggcaaagcatcttccttgttagattggttcattgaggtgcgatccagaagagaagcaagacgctacgcaagctcgtccaaggggcctggtcggtcccgcgcttgctttcccgacgcttgccccgagtccccctccagccgaccttcacaaccttgcagacgaacaggcgaaaggccaggaattcgagtgaaaaggggcattcctcacccctccctctccttctcctcctcatagttccacgccctgccccccctgccctcctcaagcacgccgaccttgtcgagcccgacccgcgggtcgagcccgacccatgtccggcccttccagagcgccgagggctgggggaggttcgtgtgcgtaagggcggagtcggaggagcggagggtgagggaggtggagtctacccccggccaagaggagagagcatcagtcaggcgaagagcgaacggcggtgggtagagagagggcttaccggtcggacccgccgccgccgccgccgttgtcgtcgtcgtcgcgccataccgcttgggatggcggtaagtcccggtcgtcgtcgaaaatatgggctggtcatcgtcgtcgttttcgctacctgagggagcttgctcgggggcgagctcggaaggcgaaggctgctcgtcggtcggtccgagacctgtcagaaccacgccccgcgagtcagccttcaaacaaactgccgcgtacacagaaagccgcgaaagagaaagagagaaacgtacccttgggcaagagcttcgtaaagtcgagcacgtactcgcccgccccccactgcggctcgtcctggagcgccagctcgagctcgtacggcgtaatgattggccggtaaaagtcctaccccgaggcccacacacacatacacgcacacacacccacagacacacgcggcgtcagcgataagcatggaggcggacgaggaaagaggaaaaaagaaaggagggatgtcggagccctagtaaaccgcacgatccgacaagagggacagacgagggctgaatgggctccagctttgccccctccctcgtttagaagaaggaagcagaggctggcgttcttgttccccctcggctttgaggttgagccaccgttccgcaagtctccggaggagaaagcgggacgtggtggagcggacggtgggactgcccctggaagggtggctggcaggccgttgtccgctccgtccgaaggggggggggtcgttcgagtcgaacaggaagaaggaaaaaaagaggaatagagaagcaaaagcagagcggaccgggaccgaccttggaatcaacgagagtgttttcgccgcaagcgacgaggacaaaacactcgacctctgcaaagtttgcgagcttggccgggttgagcttgccgacggcgaccgtatacgtctttttgtgcttctgcttgaggagggcgcggaggtgggtgaggagcgggagggagccggctttcacacccacgaagaaggagaggccacgggcgtcagtcaaggccaagacgaggggtaggaagaaaggggggaaaggggcctgaccgaggttgacgttccctacgagcaggccaaagacgtccgcgtcgcgcgccttttgcatgacggcatagcgccgcatcaggagccggttcgtccgcgtcgactggaggacgggcgacggcggctcggctgagcttgactcgctgtcggcgtcttcgggaggcgagtaggagtagacctgcgatttcgcacgagcgcagccacgtgtcagcccctcccactcatccgacacccggaagggggaagagcaaacgagcgaggagggagcaagggggacgcacgacgttctttgaatgcgttacgagcagattccttagctggaggctctcttcgcggccgataaagaagaggacaaagtcttcgagctttgtgttgggcgggagggagtaggagcggagggaggagcgggaggttgaggcggcggcggccggtggggaagggcgggctgagcagcacgagcttctaagagcgccgtcgacgatggttgcgcctgaggtggccgacgtcgagcaacatgcgctgccagcagcagcaggttgccggccagccgggcagcatgaccctcctcgagcgccttcgccgccgtcgccgtcgacgtcgtcgcaggtccccggcgccgctgctgccgagctcgacgacgtcgagcagcatctaccacccgccggcacgctcgagtcggacgacgacaccgagaggggctggcagcaccccctcaccagcttttgagctgttggaccgccggacaagcacgagttggacgacgagccgcctgccgccgccgggacgcaacacgtgctctcgccctcgtcgttggagtggggcgcaggcgcttgtccagcaggtcgggaagggtcgtcggagagctcgagcgtctccaccgccgccgccggcagcacctcctcctcatcgtcatcctgcccctcgaccctgatccgcgaaaacaccacctccctccgcttgccctttgcgtcatcgttgccgagccgacggcggcggacggcaagctcgagcttgtcgatcgcgtgtgcgtagccgacgtcgtagatgacgagcacgcctgctgccttctgttgaacggcgtcgtcgtcttcggccgcggcggacgccgacgccggcggcgaacactcttgagcgacgagccgctcaatcgccccagcacattcgtcgaccccaattggcatctttgggaagacgtagcggacccgcttgcccgcgccgagcgccgggtcggccgagggcgttaggcaggcatggccgtagtggatgaggacgtcggcggcaatatgctgagccgagagcgagtcgatgcagcagctttcgagcgcgcaaaaagaggaagagaggcggagcgggatgcgtacgggagacaagggcgaagaagggcgttgtcagccaagcgggctctctcgagcgagagagaagtgcgcaaaccaccgacctgccgtacgtcgtatccccgagaacccaagccctccctccttcgcccagctcgtccaagccccgctggacagcccgaaagacctcaacgctatcgccgaggagctcatccgggaactggagcgcgacgttcctcgccggtggctggaggcgggcgaggaaggagagggtgagaggaaggtcgtatttcgccccgaggagggaggcgggcgtaagtctgagggcggagggtgagggaaggggcgcggagagggcgtgggaggagggcgtggagagggacgaggaggcgagcgaagggagtggcggcggcatgccgagcggtcgttgtcgaggttgaagaggaggaggtcgctgcgggctgaagctgtcaactgaacgagatttgctgccgaattacttccgagggtgggttcgggccgacgagcgagcgaatgggcatccgggcgagagagcttgaacaaccacacccacgacgaacggccgcgacggacccccagcgactcagatgccgcccaaactcgcagacccgaaggtcggtagagggaatgcgatgacgacagcccggaactgacacccgtccgcctcccttgcagctctaccaccttgagcccaagggcgtcagtccccgactcgctcgctcgctcgctcgctctgctcttcgccgctgacgaccgacctgcttgcccgccgccgccgccgccgccgccgctatagttctggaagacagtccgtgcgtccctcgccctcctctctttctctccctctcctcctgcttctgctcctgcccacctcactgacacccctctctctgctacgccgcctcagactccaagctctccgccaacccacgcatctcgtccggcctcccgctcccactcgtcttccgcaaccctcctccgggttcgcgcgaggaggtctacaagagcccggcgacggcggcgagcgatgtcgctttcaaccctcgcgctcaagcacccagagcgcatcacgtcgcccgatcggcccggccgggtcggcgtcctctgccgtctgggcgccgtgtgaaccgggcgggtggggccctcctccgacgcctcctccatcagcggcgctggtgttggtgagcaggggcgagggcgaacccgggagcggggaggcgaggccgtgtgcggacggagggagcagaggggtcgacgtcgtcgacgagaggaacggctttgcccagccgagcccgacaggcgtcgatggcgccccggccggcgtcccatccaacggcgaccctccgcctgcagcctcggccttagcgcctccccggccggcccgtggcgcaggactcggactcccaatgccgccgccgctgccggcgttcccgccggggaacatccagctcttgcgggcaatgccggccgactggagcgcgaccgagtttgagacgcgcttctgggcttgctcggacattgtccgcgcggccgaggaggggccgaggggtttctttggcttgacggaggaggcggaggatgggccgccgggcgtgccgaccgatggcgtcgaagagccctccttcttgggctttttctttggcggggggcgctcgccgtcgccggcggggggcgaagacgccggttcgtccgcttcgacgccttccattgcctctccttcgccgccttcaagcctccttccgctctcgccctcctcctccgaaggcggctcccccatccgctcccgcctctcccgctcggcctcggcctccctctccctctcgcgcgcctcctcgtcccttctcatgcgctccctcctcctcctcccctcctcctcgcgcgacacacgctcgagcgcagtctgcaccttgccggggtccgagatgagctcaagcgaccacatcgacccgccgccctcttccggggcgaaggaaggcggcgggtaggcagccgccgaggcaagccggtgctgcttggcggcgacgagccgctcgaggagcgaccggcagcgagcttcgagctgagcaccaagaaagtcggccgtcgagggcccgatgtggaggccgtagcgctgggtggctgtaggtgggcgcgagagagagaggggtcagcccggggtgatttgaggcggatgaagttggcggggcgttggcgagcgctcgagggtcggggttcgtgctaccctctcgctctctctcccaagctcgctctcaatgctgggccactccccttcttgagcccggcctgcctgagctctgggctgcccgcccaggtccctgcgcgctccgtcccctccccccgcacgccgatcaacgagcacccctcgctcccttccgatccgagcctggcccgccacctcccgactggagaaggaggaggaaccgacccgtctctgccatccgtcgcttgagccactccgtgtcgacaaacgcctgcttccgatggcggttgatctccggaggttcgcgcttgacgaccggtgctagtcggggctgttgagcggcagcgggaggcggacgagctggtgctggaggggcgtccataacgagcatgtcgcctggagccgacgacgacgacgaagacatggtggatggttgagagggccgaacgacgcgtcgtggctttcgtctaagccgcgaatagatgaatcaaagggaatcaactattggccatggagtgcgctcgaccgctgcgggccatcagccgaccgtcatccgcccatcatcatctcgcccgccatggtctcgccccactacgactttctcatcaagctcctcctcatcggcgactcgggcacgtctctacgctgctcctgccatcagccagccagcgctgaccttccagcccacccacctcgctaggcgtcggaaagtcgtgcctcctcctccgcttctgcgacgacagctggacgccgtcgttcatcacgacgatcggcatcgacttcaaggtgcgtcctcttctctggcttgcagactgctctttcggcctctgtgcgagacgagcacgaggcgattcctcgggcgggcggccgggctggtgctgggtcggggtaggagcagcggggctgtgggctagctcggacgctgcgcatggcctccttcctttcaccggacaaacgaccggacgcgcagccttcggccgctccgctcgacaagccggggggtggaaaggaggtgtgccgaggggagtcgacgcttgctctggcctgtccaattgggcgacgaccgcagcatcggccacgagtgccgagccggccggggcaagcagagcaggcgggtcaattgactgaacgacaaaggaactcccgctggcctccatgttgctcgccgagcgcagccctcaaggtggaatggtgaggcgaggcgtacggcgctcaggaaggggaccgccttcgggtccgcctctacctcgcactgtcagtggcaggtcggctggcgagcgagcgagcgagcgagcgagactcggccgggggtctcggcttcgctcgacgtccagccttgatgttccaacggcctgtttgagaggtgggtcgaccgctgactagtgctcgcttcccttctccgtacccatgacgcgcttgcgctcccctcccccctttcctcgatctccccgcgccgacctactacacagatccggactatcgagctcgacggcaagcgcatcaagctccagattgtccgtccccctctcctccttccctcgaccccgcctccttccttccgtctgtcttgcgcctcacctctcccgcgcgaaagccagcccttgacactccccgctcgcccgccccgcccgcagtgggacacggccggccaggagcggttccggacgatcacgacggcgtactaccggggcgcgatgggcatcctgctcgtctatgacgtgactgacagcaagtcgtttgagagtcggtcccccgagccggctggtaacctgggcccaaagcgacgacccgactgaccgcctgcggctatgtgtaaccctccgccagacatccggacctggcactccaacattgagcagcacgcctcagaaggcgtcaacaagctcctcatcggcaataagtgcgactgcccgcccgcctcgcgccaagtgccgatcgagtcgggccgcgagctcgccgactcactcggcgtccggttcctcgagacgagtgcaaaggcgaacgagggtgttgaagaggccttctttacgctcgcgagggacatcaaggtccggctgatagacagccaggagggggcggcgccggcggcgggaggtgcgttgggcgcgggaggagcgaagacgggcaacgtcgcggtcggcgcgacgggcggggagcagagcaaaggcggctgctgctaagagaggagcggggtgtccgcgctctctcccttccggctccctttgacagtcctctttctgctcgcccgcccttcgtttcgctcctttcccttctctccggccggtcgcatacacttttccctgcccccttacttgtaccgaatccaatctctcgctcgctttgctcgctggcctctctccttgtcaacgccgacttgtacgcgaacgcgtggggcagtgaacgaccgaccgacaagcgcacgcaagattcgtatcaagcgacctgagcaagaggggggggggagattggccggtgcgatcgatttaggcccccttcgtcgatagccgtcgggcgagcccgggcccgcagctcgaccgacccgaccccgccttgctgcgtgccgcgcgcccgccttgctgccatcgcatgctccctccgaccctcctccatcaatcagcccatccatcaccctctcccatctcgcaaaccggccttcttctcctgcaagatgcccgtcactcgcgtccagcacccagtcgttcaggccaagatgacgcagctgaggcggcatgagacgtcgtccaaggagtttcggtcaggcccctccggctcgctttctcgccggctcatcgccctcctgcctccttctactcgattgctgatctagagttgcttcctttgatctgctgctgctgatagggagctcatcgccaacttgtcgacctttgtcggcatcgaggcctcgcgctcgctcccgctcaaggacgtccctgacgtgcgtgctcccttcccgcgagccgccagcggccatccacgcgctccatcctgactgcttgccctgccccctcgcctcgtgccagtgccgctcgcccctggcatctttcaccggccaagccctcgcaagccggatcggcctcgccccgatcctccgcgccgggctcgggatggaagccgccctgctcgacctcttcccgacgagccccgtctaccacctcggcctcttccgcgaaaaggtctcgctcgccgccgtcgaatactactcgaagctcccggccgagctgacggtcgacgagctgatgattctcgacccgttgatcgccaccggcaacacggccatcgccgcgatttctatgattttggactggggattgccgctcgggtcgatcaagctgctcgccgttctcgggagtaaggaggggctcgaggcgatcgagcgagcgttcccggagctcgaggtacgtctagcccgacggcgggcgctgcgactgcgcctggcgctgactgtcaatctccttcctggtccgacgcagatctacctcgccgccgtcgacgacgagctcacgcctaagggctacatcagccccggcgtcggcgacacgggcgaccgcatttttggcacggccgtctgaagatcgctcgctctcccttctccgctcgcccgactatggcggtcctcccccttttcctcttctgcctcgcctcgttctccgcctcactaggcccccccccccgttgtagaccctgcctccccttgactgaaggaagcccgctcttggatgatgttccgtcccttgctcagactccctagtgcgtgtcccgagttgcgcatcctatctccgccgaccctcgagcagctggcagccgtcatggacgaggccgacctgctctcgcgtctcgacgctcatgacgcgctgctccctcaggccgtcaatcaccctcgccgcccggtcggccgcgatctcgtccggcaacgggccgagcgccgagggcggaccgggcgggaaggtcgacggcgagcaggaggggaggaggcgggcgagcgaggcaagcgagatgaaggagcctgtgcggccgacgccggcggagcagtggacgatgacgggcgggccgaggccgccttgggcggctgcggtcgatggctgggcttcgatattcagccggttgacgagctcgatcagcctggaggccgccgcggaagatcaggcccacggtcagcggcgaggagcaggactggcggcgggaaggcagcaggcgcaccggaggagcgtctcgaggccgtcgcgcccttcagggacgcccttgtccttccagccggcaaagtagacgtgcgtcacctgcttgactggcgaccctccggccacgagctcgagcgtcgagacggtcgcctgctcggcagcctgccatgtctgccggacgagccggagcgtcactggtgggccggcggcggcgctcgacgacgacgacgagaaggacacggacggggcctcggcggtcggcatgtatgtgtgtgccttgcggacgccggactcaaccggagctgtcaactggacgacgacgtgcgtgtccgacgtcagcaggagccggaagaaggtatgcatggtcgccggtgtcggcgcctagcgaagtgcgcagttacgacagtcggtttgcgtcagtgtcacagctcaggcaaaaccccaggagatcaagagcggccagacggacttgagcagcgatccatcgccgctgctcatcgagctcgtcgatccacgaggcgttgaggtagccttctggcccgtcgttccccgcgaccttgacccgcgtccggtcgtacgggacgacgtccgagtagcgattcttagccccgttggccgggtcacgcgcggcgagggccgagtaggcttctggttgggtcgacgcctggagctggacgcgccgggccttctcccgaggagagaggagggcgtgcagcgtcatagctgacggcgacgagcaggtgggcatggtgaaggcggttggcggaacgggttgctgaagttccctcttcggtcgggtcgtccactctgcagcttttgcgtgagacgatacagagcacttctgagtactggtcgggcgaaactaaaagcgatagaagggtagcgagtgagatggcgagggtcaaggtcggggagctaagctgcgtcgagcgtcctggcccttgagctctgctccattctgtcatcgatctccctcctgcacctcgccactctctctttccagaacttgctgcagagccggccttcccttcgctgatgagctcgtcgtcgttcgcaaagcagaagctcaaggcggccaaagaggcgatcgccaagcacgactgggtgtcggtcaaaggcctggccgagcagatccacgaatacgagcccgagaactacacggcgtctgtcccccccccttgttggattccctcgaaggacatcgagctgacgtctgctgagctacctgtcgcgctgtagctgggtcttccttggcctggcggagaacaaccgtctcaagacggaggacagcgaggtcgtgagtcgtccagggatacgtcaccggtcgcctgccggctgattgacctccccgtccttccccaaggcctacttgaaagcaacgagcatctcgcccgagattccgacggcatggcaggtatgttgtctgacgcggcaaagccctgctctcggttacttggcctgaacctccctgcctcaccctcgatcggccagggtctcgcgtcgctctacacaaagctcgagcgctgggacgagctcgacgccgtcatcggccggctcgtcgatatctttgacaagctgtctgtccctccttcgttggtgagccgcaagcgttcgatagaggcaagctgacgttctggcatgttgctcgacagcgaggacccgatcaagctcggcgagcagctccagaagaaggtcgacctcgcacgggcgcacctgtcgcggccggcgctcctcgcctcgctcgccctccttttgcccgacgcctggtgcaatggcacgctctctctcattccgctcccagagccgaccgcaccgggcgcggttccgtcgtcgaccgccgccgttcagcacgcggtccacacgaccgagggctcgctcgaggtgctcgaagagattgtcgccggttgggaaaagcaggagctcgaggagcgcacaaaggagattgacaagcgccggcttcgtcttggaggcggccgggccaagacgcgcgcacagattgagcgcgaggtgttcgccgagctgggccggtcgtcgcgcctgccggcgctctacgaacagcttctgaaccacccggcgctttcggtcgaccgactgcgggcggtcgaacacgccctgcttgtccaccatcggacgctcctcttcgcgattccgtctaaggagaaggacatcaagcgggccgagcgcgaaaaggtccagaagctcggtcgcggcgttgtgttgatccgtggcgccgaccgagacgcctgggacggcgagcttgaatgggcagattggacggcaatcggttcgtaccgtggctgcagtgttcgagaggtcgacggctcatttgaaccctctcgttcccctgcgcagacgagtacccgctgtcggacctgaaggctttcatcaagctcttcccagaggaaccactgacgtggtttctccagggctacctcttgtactttggccttcaggacgccgagaccgacgagtcaaccgacggcgtcagagcagggaagccgaaaaagaagtccgagaagccccaggccgaggagaatgaggcggccggcgacgacgccttcaagttgctctttgtgcgcgagaagcctcccctcttttgctgctcagcctgctcggatgctgacgccgccagcgtgacttctgcaggacggcatcgacgcctcgccctcgtcgcttctcgcgcaccgcatcctgtcgcacatccttctcctcgagggcgactttgcctcggccatcagcctttgcaacgccggcctcgccctcctgacgacgctcgtcgcccgaacgggactcaccttctccaagtcggaactcaccttcaagaccacgctcggcgcagcctacacccacttttacagccccaagcaccacaagttggccgagccgctcctgcgcgaggtgctcgatgcccggccggatgatgtcatcgctaccctctccctcggccacgtgcttgccgctcaggcttcgtgggaggacgcgatggcgctctttgacaaggctgcggcggctgctgaggccgatgacaccccagccggtcagcgccggctgcaggaggcccgggaggagagcgcctggtgcaaggccaagtcgggccgcgttgatgaaggccgggtcgagctcgaggcgatcctcagcgagctagacgccgaagcggccgagggcgccgtcagcagcgagcgtgacgcgactcgcggtgcgagggtcgcctggcggctcggctcgtgccttgctgacctgagcggaagtgagcgagaccctttgatcatgcccgccctcttctcgcagcctgctaacgcatggcgtttcccctcatgcagacgagccgtcgcaagctgcgcacgacctctacctctcggccctcaagcggtcgtcctcgtttgcgcctgcctttacctcactcggcatctactacgcctcgctctcgcctccggacaccgtccggtcgtcgcgctgcctgcagcgggcgtttgagctcgatgcgcggcaaggcgaggctgcccggcgcctcgccgacaacttcgccgacgacaaggagtgggagctcgtcgagatcatcgccaagcgtgcgatcgagggcgagggagggctcgagggcggactcgagagcaagggctcgaacgagcgcgagcgcgaggcaaagggccgcttcctcgtcgagaacatctgggcatggaaggccctcggcgccgtcgagctcgtcagtcctcgggcccccactgcctgccccatcgctaggatgctgacgctgcgtctacctcagacccggtcgtcgtacgccaaggcgatccatcacttccaggtcgcgctccgatgcgagccgagcgacgtctcgtcctggcttcggctgagcgaagcctacgctcactctggcaagcaggcagccgcgctaaagacacttgcgcgggcgcaggagcttgagccgacaaactgggtcgtcaactatatgaggggcgatgtccactcgcagctgagttcgcacgccgaggcgatcgcttgcttcgagcaagttctcgcgacgcggccgaccgaaattggtgtcctcgtctcgctctcgcggacgctcgtcgcccaggcgcgggagcagtcggtctcgggctatcatgcccgggcagaggcctcgctcctcggcgcactcgccgcgacttggaccgttctcgacagcagctcgggctttggcagcctcgcgtggaagaacgtcggcgatgcctgcatctacctcgcacagctcgcccactcgtttgacggaggccgcatcgctgccgtcgtccggcccttcgtccagcggctggctgccgacgaccagtcgggccaggcgtctgtcgccgacgtcgtctctgcgcgccagatcgccaagacgccagctgcagtcgatgcgccgtacttgctcaagctggcggtctgcgcctacgcctgccgggacaacctcctgatgagcgacgacaagctggcggccgcttcactccacgacatcgcgatcgcccttcaccacctggccggctcgctcccgtacggtcaaaaggagcttcagagtgtctgcgtccggcaggcgacagcatacgtgcgctcggcgctccgcttccggccaaaagacgagcagctctggacgacgcttggcacgatcgtctttgagtctagccccaacctcagccagcatgcctttataatggcgctcgaaatcaacccaaaggtgcgcaggtagccgtctgatcggcccttggcttcgcggctgactaacgagtgcctctgtcaaacagaaccccgtcgtctggagcaaccttggtttcctctacctgacggccgatgacatcgagttggccgcccaggcattcctcaagtcgcagacgctcgatcccgattgtgcgctcgcctggatgggccagggcctgctcgctctcaaggccaaggcgacgcacgaggcctcgctcatgttcgagcacgccgccgacctgtcgagcaacgcgctcgtacgtcgcgctgcctcgttgttgtctccgagacgggccttgctaactgctttgatctgccggttctgtagctcgaggccgacctgctcttctccctcacgacgcactcgctcttctcgaccgatgcgacgcggccgaccgatgcctccctccacggcccggcgtttgtgctccagcgctacaccgatcagcggccgtcggacgcgtcggccctccacctgcacgcgctcattctcgagcggctgggctcgcacgagccggcggttgctcagctggcccgctgcgttgcggtgctcgagacggcctacgaggagtcggaagacccgctggtcgagcgcaagtttgccatcgcccaaagtaacctcggccggctgcagcttgccgttgatgacagcgaggccgcgctcgaggcctttgcgggcgcacttggcctcgctggcaccgacgacacgtcggccgaggcgaccgccctgcgagtacacgcgcactttggctcgggtctcgctcactactggaagggcgaactcgacgagacgctcgggtccttccagtcggcgcttgacgagcttgacgcccggccaatcggccacgccaaggacaagatcacggttctcctcgcccaggctctctgggacaccggtggcgaggaggaaatggaggcggctaagagcaccctgctcgacacgtacgtcttgccttgcgacttgccgagcgagctacgaaagttaacgcaccgcctcctttgccagcgtcaccgctgactcggacaacctccaggccgtcattgcgctcgctgcgatgggctccatctcgcaggacgagggcctcgtagaggcagctctagccgaggtgcttgccaagccgctcgacgtccgcgagcgcctcggcggccaggacctcgatcgcttcctgatacagcaccacctcgggaatgtcagtcgaccacagccccttttttcaacgagcctttccatactgacgccttgacgcaactttcaattcgctcagggcgatgccggcgccgcccggacagtcttgacgcaggcgatccacctccggccgggctcggtcgagccgctgagcgaactcgcgcgactcttcctgcaagagggcaacgtcggaatgggccgcaagatggcccaggccgcggttgacgccgaccggcacctcgagaccggctggaaggcggctctcctgcgttcagtcgcggctctcaccggtggcgacgccttgctcgagggcgagacggccgaggaggttcatgctaagcgggccgaggcactccgggaggcgcagcgcgttctgctgtcacggccctttgactcggacgcctggcgagtcgtcgaattggcccggcagggtcaacaggccgcctgaggcgcacccgctccagccgccctctagccgaatcgatgaagccaagagggcggtaggcaacaggcgacataagatggcatagccttgcgcagcggacaggaagacggagggcctcgacgaccgtacaggagaagcgtgcaacagtgagatggtgcggatggggcagaggatagcggtcgcgagcgtacaacaagcaggggtcctcccgcagtctggaaggacatttatgagggcgacggacgctcctcttcagaaggagacgccgtggccgaggtcgaagtcgcggagcatgaactcgaactcgtcgtcgttaaattgcggctggaggtcatgtgagagggccagcgtggcaaagtcgcggccctggaaggcgaggttggcgtcgagcgggccagagccgcccaggttggggaagccggcaaagggcgcatagtcgagccctggcgggagcgccgtcgttgttgcggcgagcttcggcgtcgactcgtagccaaatgagaggaatgacggcgtcagaggggcgtaggtcgtcgcgtagtctggcagcgtgcccggtgacgtctcggccggagcggtccctgccgtgtgctggctcgaggaagacgagttggtccgccgcaggaccttgaccgcacgcttgagctcaccctcggccttgcgcttgctgccgctgccgtccgaggcggcgccgccccctccgccgacctttcgcagcgtctcctcgacgagcgaccgcaagacgatgacggctttggccgcgatcgtcgagctgcccttgaggccctcgaaaatgccaatcacgtcgttcacgagctggagcgagtcctcggacgctgcggccggcgagccgacggctgcacccgcgctgtgagcgtactccatgacaaggatgacgctcgcagccgtcgaatgactagagaacccactcagcagagatcggcgcgtcagttctccaggccgggatgagctctggcgggcgcgactcacgcaaggacggtccacgtcttgcggaagggctcaaagtcgtaggatcggaggagccggaggattcgacgcgccgcgcctacgcagacgtcacgcgagcgcttgtagcgcgggtccttgaacgcccggccgagaaacggccggtggaggacgatgaccttgtgggccgtgctgacaaagtaggcgttgcgctgccactcgagccaggccggcgcgtttggcggcagcggcagaggattctcgtttgcgtcgagcagcatccactgcggcgcctgtgacaggagctgattggcctcttcgtccatctgtcggcggggacacgaacggtcgtcagtctggtgggcgagaccgtttgccggtgccagttgcatgacgggcagacgtacgcggaggacgctcgagtaagcgatggtcgcacccgacgagtggaggccgtcaaagagcctggcgacggcgaggacgaaaagggcgttcggcaggtcagcgcgtcctcggttgactacaagactggagcgaaatctgacttgaagaccaggagggcaaacttgatgagctgcgacgtgtgtgagacgggggtcgggatctccttcgacagcggctgcaggcgctgggggtcgagaagcgcctcgtcaaagcagtgcaggggaaacgccgtgtcaaactgccggggcgagacggctgcaagcggaaccggaggcagcgtcagcatcgactttcccagcaagcgcagcaccccagtcgggtgacgtacagcaggagcggttgaacggcaggtggaagagatctgaggcaggcgagcgagccgaaagcatcagcttgggcacctccattgggcacctcctgtaagtggccgcagacgggccgcaccttggatgacgagctgccaccacgcgcgcttgcaaacctcgcggacaatgagcgcccgagggtcgagctgcttggccgtctgcgcgctcgggtaggtgtcggcgccgaggtggttgaggttgagcgtctgcgcaatcttgacggcggccgccagctgggtaaagtataggtccgagtggccgagatggttgaagaggctgggcgagatggcaaagacctggacggtgtacaggctgtggttctggagccacttgtactcgtgcaaggcctgctggattgcctcgaaccagcgcccgaggaccgagtgggccggctcgtctgaaaagagctcgcgcgcctcggcgctcggcaggtgcagcagcgccgaagcgagaacggaaaacaatagcgcaagccaagccttgttgacttcgacctcaccatgggacccttcgtcccagaacaggtcacattcggcggcaaaggtcgggccgtggtagccggcgtgcagccaggacaccatcgacatgtcgtagttgacgagtcgccggccgacgagttcagtcggcagctccttgagcaggttggctgcatggatcggccggtgcggccgcttcgtgcctccacgcgacacaggccgagcgccgacctgccgggaggaagcgggcgagagatgcgcagcgagcgacttctgcggcgtcatgccgctcgagccgggcgtcggctgctggtggtccggcacggcgctcgaagcacgactccggccgtcggccgactctgacacctcatcgtcttcgagcgcaccccgcggtcccattccaaccagggcgccggtggtcttggcgcgcgagcggcccatgctcaggtactcgagcgtcgccgccgcgtccgcttcagggtccatctcgtcgtcaaagtcctctgggaggggcggcgcggcctcgattgcttgaggaggaggcagcggaggcggcgttggggtgtagattgggatgggggctggccgtggcaaaggtgtgtcggccgagaagcgggcgatgaaggtcgtaaacatgccctcgagcgaatggatgcgctgcgagagctgatcgatcgacgaggtcgtcgaggtccgaatctcgtcgagctgcgtctggacatgtcgagcagggcctcgagacgtgctgccagtcggaaagggtcagaagcggcatcggggagcaatagaaggggcagctggtgacgaacgtcgggttctccttgatgacctcctcgaggtgacactcagattgcttgcctcgcttgatgcagttctggcacgggatcgtcttgtcgcatctgttggcaagcggtcggcgctgccgtcagctaaacatccctcgccgggctgtagagcccaacactctccggccggcaaagccctctagccgaattgatgaagccggacgcacctcgtcttccgcctcgctgaggatcagaatggaaaagtgacggtggggagggcggcgcaagaagtcagcaacgggggttccaaggctcaaccggcgtctcgccgtagccgagctctctcgtgtgcgggccccgcggcccgacagaccgcgcgcgcgcagatggaaggagggaagtaggtgaacgcactacactctgtgcagctgcgaagaaaagggagaaggcctcatggtcagcgacttggttctctccttttcctttcctctttcagaaactcacgaaagtggttgacgttgcgatttgcgaggcccagaggccttgctctcggccgtctgcgagccgctctgggagcctccgccgtcgtggccggggctctcggaccggccgtcgtggtacgagccgccggcgctcgtgccggcgccaaaggcgtcgtgagcatagaggtgctgggctgagagcggaaccggaggcgggccgagcgagccttcggagggcggctgagtctgaggcagctcgtcgtcgaaaaggaagcctagatcagcggggatgcccatcgtggaggggaggaggggagggctcggcagggcttgggacgtgcgcgagagggcggaccttcggtagcatcgctcgccttgctgctgtgcggggtcgggtcgaggggagttcgaagtgggtgagagtcgggcgagtagctcgtccgcgccgaagggccgaagggcaatccgtcgcgcgcgccagcctgcgtctcgccgtcagcttgcgctcatgccagcattcgagccttcctttcttcgatgtttcaaggaagcttgctgctttatgcgatggcctctttctcccagcctgtccggaattcgagcgactttcagaagacgaaaggaggtcggatcgctcggccggccgttcggaaggcggctgcgcgcgggcaggtcggcggcctcggaggcattcaagcaagcccttcagcctgcgagattgcctggtcgcatgccatctcctccgacgaccatctcatctgttcaagacgctcatctcctcgcctcttgcacgacccatcgtccttcactccacctcgcgccatgtcgagctcgatggaccgcactcagtcgaacggctccgaggacgcctcgcactgctacacgctgccgacctccctgcccctggcttcggcctcgcacaacgctgccgggcacgatctgccggccaacggtccgtatctacctctcttcggctgactttgcggctggaaatctgacctgcttccgttcggtctcgctgcggcagcttatacgctgcatcagacggcccagctcgagggtctcttgaccatcctccgcgacgccgagacgagccggtgcgtccagccgtcctttgaccccttatccgactggacttgctcacccatctccgactgttcccggcagaggagattttgtctttacctcgaatcgcatcatccggcttctcgtagaggagggtgcgtcgactctgcgtgccgcgagcaacttctcgtcgctgacatgagtgcactccttccctctcaggcctcaaccacctgcccgtctacccgaagcagatcacgaccccgctcggggacacccacaccggcgtaggcttccgcggcaagattgctggcgtcagcatcatgcgcgccggcgaggccatggaggctggcctgcgcgagtgtgcgcgcagtgtccggctcggcaagatccttatccagcgggtgcgtcttctgtcgctggagctcaagaaatttcggaactcaccagccgccttctaccgacccgcccgtcatgccaggatgaggctacagcccaggccaaactgtactacgccaaggtccgcggcttgtcgcttgccaccgccaagcttgaggctgaccctacaccgttccgaatgcgcagctgcccgaggacattgcctcgcgtcactgcctgctcctcgacccgatggtgcgccgtgcaccgacacaggcttgacccgacgtagctgctgacgtggttttttcgactcacagctcgcgaccggtggctccgttatcaaggcgatcgaggtcctgctcgagcacaaggtcccggaggagaatattatgttcctcaacctcgtacgtctctcgcagccaggtctcagtcaccacttggtagtctgacgccttgactgtcgacccctcctcagatcgccagtccggagggcatgaagaaggtctgcggcctcttcccgaagatgaaggtcatcacggccaaggtcgaccagggtctcaacgacgtgcgcagtctgcctcccttcgtcgtcctggcgagggcctgctgaccttgtcctccttcgaacgagcagaagatgtacatcgtcccgggcctcggcgactttggcgaccggttcgttcccttcacacttggaggcggccgagcgaccttttaggctgacggaccttctctcctctcgcatctcacagttacttctgatgtcggcccggctaagctcagcatcgccgtcttctctgatattcggcctgtcgaccgtctccaatcttcaactccaaacccggacccgcaaacgccttcgcctgacttctcggaggacggcgcgcccaggcagacgctcgcacagactttagcctgatcctccttcaaatctctggagagcgtctcaacagtcaaatcatcatggcccttgtatatctctctcgctgtcagccctgcttgcatcgaagcgacacggcgtggtgaccatcggagggaagaaatggagattggtcaaatgcccgggttgctggcctgtgttgctggacaaaggcgaaggggaaagtcggcccggggcttgcagcgacggccgccaaccacgacctcgtcaatccccccttccctgtcaccccacccgccttctctatttgacagaggacctcgcatgctgcagcgccggtatgtgtctagactgcagcaaatgagctcgttcgcgtgctgactttcggccccttccggagcaggctatgattcgacgaccctcctcctccctccgcctcgggccacgcccgaccggccagacagcgagcaactcagccggccgcacgagtccgctgacggtcgagccgcacgccaggcgggctgcctcgcagctgcagcaggccagctcgtccagcaaatccttcaacgccatccacagcgcttggttcaggtcgcccagccggcctcagcccggggccggcagctcaaagacgcaagacccgctcctgaatagcgcttggacggcgaaggttgccgagccgggtgcgtccacgtttcgccttccatcattcgggcttctgtcaaaccagagcgggagactgacctcctatgttcccttcgaatgctcagacccgtcagcaaagcgaacgtcgctgaggacagcggccaacccttcgacccgtacggcacctcggcggccctacagcgtccagcagtgggagggcggcgcgtcttccgacgtcgacttctccttcctggcaagcgctgggccgtcggtcttgcagccgagcgccggcgacagcctatcgatctgcgacgtgtggtttgcgcgcccggtcagaccaagcgacggcgaggtcggcccccgggacaagtctcgtcgcagcccgacttggcttgtggacgatggtgcgagaagcaagcgaggcttcaagtccaagacgctcaccttggtcccgagcggcggaaactcaaccgacggcgtccactggggcctcctgggcgacgtcgacggcggagagcggccgcgcgaggccttcagctcgctgtcatcggtccggaagagagtcgtaatcagggcaaagccgactccggaagagccgccgccaataatcgagggcagccgacctctgccgccgcactttttcacggccaacgcggaggcatcgagcagccgccgccaatctcgcatccccgctcctccgcgggtccatgacttccacaacgctccgttcgacccttctgcgccgacggggaacgcaccttcagccttcggcgtcgccgctccgccatcttccggcaaatttctgctcggccgtcggtcgcgcgcctctgttcagcccgaaagcctccagccagcagcgccggcgccaccctcaacattcttccagagtccgagccgaccgctctacttcaaccccgccgcccgcaggaccgcgtcggagatcatcgacccgaacgcgtcgtccaagaaggctaagcgctccgtggcagcgaaagccaagcccaaggccgacgtgcctgccaatgtcgagccggcaccgatcacactagtcgaaggcacaccggacgagacatgggcacagtacgccgagctcacgccggccggcttctcctcgagtcttctcgccgccctctttgactcacagtcaaagcacgccgacctcgtcgttcgacgagagcgcctcgtcaacgtcgcgctccgggcgagcgcgtttgacagcgcgggcgagacccagctcggcgttgatcggcttcagattgccttcgaggccggtctcgagacggccgaggcccatgagcccgtcgagggcgacagccagcgagaacgggcgataaagctcggccaccgcgaagacttggcggtcgccttgcgtgagatctggcggccgattaccgacctcaccgaccagggtgacgacggcctgacctgggccggctcaaatgagctgctctggcgctgggtcggtcttcttgcttgggacggacccgagtcgcctggggaggagctcgtcgcgcgctcgtacagccggcccggcaagcgagccgaccgcgtcgacgacctcgccctcttcctcgacaagatgggcgcgccggccgaatctcagctcgaggactttgcgctgtcaatctcacgtggctgggtcaaccaggacctcgtcaaggagctccaggaagccaagcagcaggtcgttgacgtccgcctccaccgcaacaaggtgcttagcactcgacgcgacggcagcttcaccgccaaggagactcgagagaagctctggagctttcttcgcgacgcgtacggcggccgcaagggtgtcgccccgaccgccgtcgaaggctgggtcgagactctcctcgtcgcgccaaagctggctgccgcagtggcagacgagacgaccccagtctcggtcgccgtctcgctcagctcgcgctggacgtcggccatgcttctggtccgcaacctggcccacagtcagcgtgagccgccagcctcgtgtctctggcacctgtgcgacgctctccagcgactcaagacgtccgacgaccaccaggtgccgctccagaacctccgagcgctcacctcgatcatcctccagacgcatcccgggctcacgctcctcgcgccgcggcagcactacgacctgctgctcgaattcatcgctcacgaggatctcgctttcgccgagcgcctctaccaggcgttccgcatccgcgagcgctcctttgcattccctgagtcggtcacgatgccgctcctgaagctcgccgtcggtctccgccaggcttcgccggccgacggcgaaaacgtccgggcgaccaacccggcctttgccggggccgtttacgacgatcggatggcttggggcgccaaggccatctcgggcaaggtgctcttctcgctcatctatgccgtcggccgcgagcccaagctcggcggtctcgcgacgcgtattctgtccgattcgatcgtctcacacgggcctggcgtcatcacagacgaggttgccatgtcaatctcgcaatcggcccacgaccgcgtcgtccaggcggtccttcgggcggccaacccgagcgtgcggccgacggccaaagaccaaatggtgacggccagtagcgccttctgtgtcctgccgctgatccgcggctgctaccgcgggctcagccggccaccgccggtgagtgccttcaaccggctgctggcgctggcggcacttcacccgacgccgtacaacacacaggcggcggtcgccgagtttacgacgatgatgaaccacggcccgctcccagacctcgagacgttcaacattctcatcagaatgcacctcggcgtccggacgaagcgcgacggcatcgccgcaatgtttgacaagctcgagccttgcgagccccggatcaacctcgtccgggccattaccctcttcaagacgatggtcgtccgccagggcatccagccggacgagcagacgttttccagcttcctccaaggcctgctcagcgtcggccagccggcggccgcattcgagtgcttccggcacgcagtccacctccagctcatcccgtcgcacgcgagcacgctcatgctcgtccgcgcgctcgtcgacgaaggccagcacgcccaggccaacaatgtcgtcgacgcgctcacgcgcctcaaggacgaacagcgctccgaggactcgatttcggccgttgcgatggaagcgtccgagatgaaggctctctccgacacggtcctgtcgaccgtcatcccgaccgccacgagcccgccgccggcccagtttggtgtgagtggccgagcgccttcttgcgacaaaggcctggaactgacggcctgctttcatcccgatccatcagggcgtggcgccgcccgagcagccgaccgactcgtccgaagccaaacctgaggcctcgtccgggcgctctgccgcctttgcatagaccgacctgcatctcccgccctctagatctacactccctcgtcctgctccttggtcctgttgtaacccctcacagttacgatcctcatgaaccgtctacgaccccagcttggcgttacggaaagaaacgaggcgcatcacatctcctgccactcgaagccaccgacaagcgcggtcgtcgacggcagcttgccgacatttggcgagaggatcgtaaacttgcgccgctggatgtcgatggcggtgctggcagagtcgagcagtcagcggcacagtcaagagtcacagagacgcgtgccgaggagcactcacatgacgacgtagcctgcgacctcgcactttgcgagctcctcgcccgcctcccgggccggctccagctccggctcctccttcttgacagccccggcctccttcttcttgtcggctgccgctggctttggcaagcgtacgagcgcgagcaccgcgttcaacaagtgcgactcgtgcgccggcagcgtcgggtcgaccttgttaaggatcgtctcggtgatggatcgtgcggtgccaatcggaagcgccgacgagggcgcattgtactctgaacggtgttcccgtcagctgtcgatcgaagaagagatagaagaagcagacgggacgtaccctcgcctgcgcggtagatcgtgagctgatcgaaacgaattgtcgttgagtgcggcgccaggatgagcggagtcatggccgacggcccagggagggcttcaagcgtcgctggcgcctgggggtcgccgtaaaagtaactcttgatctggagcgcctgcgcccgcgaacggtaagcggcgtcgaggtcgacgacctgaggaaaggtaggcatgagggtgtcagaaagaccagagacacaagcgactggcttcagcgatgacgagcactcaccccgccggacttggggagcttgatgacactaatgcgcgactggctgccgccaaacatgcgttgcatctccatgtggagcttctcatgaccgacgacgagcaggcagttgactagaggttgcgaggccaggagaggacgatcaggcgggccttctaacggagagacaggaaggcgagccttctaacggagagacaggaaggcggacgcactcttgaagacgtcgatggcgtccttgacgaacgagtatttgcccttcgacgtgtcgccggcctcgcgccccagcgacgggtcgataaagcggccgctcgtgtcgacgatgagcccggccgacgtaccgatccggtcgctcttgcggcgctcctcccactttgcgcccatgtcctcagccagctgctcccagagccgcgcccggcccgactgggcgggcgtcgggtagccgtaccaccatgagagcgggaggagcgtcgacgtgagagacggtggcgggccggttggcagaggcgagccgaacgaggacgccggcgacgatgtcggcagctggtgcgagatcggcgtgagcgagagcgcccccggaggcgagtgcgggccctgactcgcgaccagccaaggagaggcgcatgtcagtcagtgatcatcgcccgtgcccggtccgccctcgcacgcacttctgacgggtccagatttacgaggaccgggctccaaccgcggccgccgcggttcgtccagttgaggagcgtcttgcagatgctcgtcttgccgctcccctcgggaccgagcaccatgacccgcggcgaatcctcctgaacgctcgcccactcagtctcgtccgctgcctgctggtcctcgagcgaaagcgcggcaaagtctttacgccgcttgagctgctcccggcgagcccgcaggcgcatgccctcgagcgcgaggtggatattcgaaagggcgacgaggttggtctcctccgagacgtactcggtcgcgggcgtgcctgccacgtgaagagtccgtcggacgccggggagagcagacaggaagagcaaggcaagacagggtcaggctcagttctcggacggccagccagaaggagaatcatcgaacgaagacgccagggacccccttcaacagtcagcccagagatgtcagtggtcgatcctgctacctctgttacgccgacgaggtgaccgaggcaactagaggagcccagcgccgtcgccttcatctctccattccccctctgcaatgactcccagctccacgaccacacgaggcgcttcattcgataccgccgagggctgccggggactcatctcgatctggcagccttcccacgagaagatggcggccttgcactcggccaggaagtgataccaccgcttcggcgccatctcggcgccaaatatttcggcttggccttgcaagagctgccagggccggcaggtcgggagagcggccaggcgtcagcgcgagcccttcgaaagtggaggagccagagccggccactcggacgcacctggatggcgatcgactcggtctggtcgagctcaaagcggtactcggacccgcccgggacattccaggtcgccgtcgccggaggaatcgctttgctgctggacattacgaggtcagaaggagaaggaggaggagggcgttggtggtctggcaggcgactcgaggtgacggagctttggtcgccgccgccgccgcgcgcgcgcgggctgcgggcaagcaaacgaagcagggtcgccaggcgagagtcgccttaaaggcctccttcgaccgagcacaaactggcaaagacgggtccagattcatttcctgatctttggtcgtccgctcgaagtcgaacgagagccgtgcaattccagacggaagaactgcagcgagtcgtctgtcccggtcgcgccctcttttggccgtcgcgcctccccttgttgctcgctcgctcgctcgcgcctaggcccgctccgagcctctgttgcttctctctcaccggccactccttctcctcctgcttgctcttcccttccttttttgccctccgctcgcctctctctctccttctccctatcggctcgcgctccgcatccgcctgccttcctttccagccatgcttcctccaggaccgctgccggcggcgctcctctgcctactcctgtcttcgctcgcctcgctaacagccgccgcccacgggcccaagggtcgctcgctcgcctttcacgagcgttacgcccacaaccggcgggcaccgggcgacgccgtcgtgattcccatcggttcagagtcgatcgtcatcccgaccccaacggtcgtcgtcccggtcgtgacgccctctgtgcccgtcgtgcccgacgccgacccgctgccgtcgtcctcggcgacctcggtcagtctctctcgccagtctctctgtgaagcgggtcgcgggacaggatttcggatacgaggcgccgggtgcgagagaagggggccgggatggtccgagccaagccgcagagagagaaggctcgctcggcttcgggccggaacgcccctctgtcgcgcgactcctgaatgaggtcgacctccagctcacgcactgacgactatcgcctctcctgcgttctccgtgtcaggctcgcgtgacacctctggtgccatcgagctcatcctcggtctctgccgcaatctcgagcgctggcagctcgtcggcggtcgcctcctcgtcggcctcatcaagcgttgtctcgtcatccgccgtctcgtcctcgacgagcgtctccacttcctcggctgcgccttcgagctcgaccgaggctgtctcatcctcgacgtcgtcctcggaatcgtcgtcgagcgtcctgcacacgagcacaaacgctgccggcaagatcgtgacggtgacggcccccgcggccaacggcgcagagtcggccgcgtcctccgagtctgccgctgcggccccggcggccagcggtggcctctcgactggagccatcataggcatctcggtcgttgccggtgtcgtcgctcttgccggcggcctctacctcatcttcatgctcggcaaacgccgcagccgcggtagtgacgacgacggcggcatcaagtggtgcgtcgcggagacgtttaaccgatgcctcttctcctgactgacctcgccgccgccctctgccatatcaggcccgaactgaacgctcacggcaacgaggacgacatgatgggcgtcgcgctccctgcccgcccgaccggcggagctggccttcggtccgtcgcacccaatcgtttgcttggtccgaacccctaccgtcactgaccaccacatccgctttctttcctgtctgcagcaccaacgtccttgacggcgaagattcggacgacgaggacgagcacacgtcgcgtggcacccacctcggctcaatcgggcccgactcgaccgactcgtacgcatacacgcagccccagcagcccaacacgagcgagatttataatgcgacgccgtatgtgccaaacccggcgggcggcatggaccaggacccatctggttactacggccacggagactatggccagcagcagcagcagcactcgtacgacgcctatgaccagaagcagcagccgcagggcggcatgctcgaccggagcctcagcaagggcgcggccgacgtgctcgcctacggcggcggtagccaaggcgcgagctcgtacgacggtcaccagcaacagcagccctcgtacgacgggcaccaacagcaccagcagccgtcgtacgaggagcactcgcaccagcagcccgtcatggccgaggcttaccccaagcggccggtcgccgcgatggcggctgcgtttggcggcccgcgtacaaacagcacgggcggcgactcgtccgaccccttttcggccgcgggcgtcagccggacgctctactgagcgctaaagtctagcgcatgtccagagcctaccccgccccctgtcgaccttgtaccagatcattcaagccccccttcttccactctctccactctctctttctcaacggaaacccctctcccgccctcttcttgcttgtgtcttcgcttttctctcgctccgctgccgctttacgttcgctctccttgccacgctcttccccccccccttctcgccgcggcgactcgcacgtcgtctcgcgatctcacacgtcgtcctctgcctcgcttcccaaggacactcgctcttgctgccaaccttcctccctgctaggtgtctgcgttgcgccgtgcgccgctggtcggccgtcgaagtcatgccgtccctgccaatctatgtcgggtctcctgccgtgatatctctcagactcgtctagcgggttcacatctcatcgcgggtaagggaggaggcgaagaaggatgcagctcggccggacacctcgcacgggcggtctagagtgagccggtgttgagcccctttgcccgccaggcggagcggaccatgctggcgacaccgcggacctcctttggcccgcgggcgacgatggtgagctcgccgttgccaacgccgtcgacaaagacacgccgggccacccgctggaggtcggccatcgagacgtcgtcgatccgctggatcatgtcgccgatcggcagccggtagccgttcatcagcacctgggcgccaagatcctcggcctcgacccggacgtcctcgcgggcgtagagcatggccgacttgagtcggttctttgcccgcgagagctcgatcggtagtaccgggtacgaagggttggacggggagaggagcgaggccagctcgagcgcgagccggtcgaggtagcgcttgaggacgtggaactcgcacgtgagcgagacggcaaacaggccggcgtccgaatagggcaggtttagcgagttgacattgtcgatgccgtagctgccgctcatcactcccgtgtaaaaacgcgagaggagccccttgcccggcccgccggacgagaaggaggcgccgtcgccgagcagcatctggatgaccgccagggcatactgcgcagagatggaagggcagacttcagcgttagctttcctttccgagtcgcagaagaagacgggagaaagctcacgacgtcgtcgctgttggcgtcgacaccctcgcagccgacaaagacatgcgccatctccatctcttcccggacatcgatcgagacgccaccggtatagacggtcatcggctggccgaccggcgggaccgagggcagctcgagcgagggcagcgaagaggctggggacgacgtcgtcgcaaacgacttgccgctcgacggcgacgacggcggcgagccagaggatacggacgagccgggcgtcgaggacggagtggccgacaacagcgattggaaccacgtctggaccgacgagctgctactgctactgctgctgctggaagctggcgaggcaagcggggcgagcgagtcggaagaggccgagggtgacagtgagggcgggtggtagggcaggtggccgaactgggcctgggcgagctcgacgagcgcctcgtgctccatgcccgttccgctgatgacgatccgttcggggcggaaccacttttcacggaagagccgcaggccctcagccgtgatgagcgagggcatgttgccgtgcgtgtcggggttgacggcctcgaccgcaggcaggttcgatcggccgagcgcccggccgccaaacgcaacgtcctggaggacctccatcaggtaggcgtcgaccttctcatcgtagagctgaagctcgtagcttgccgcaaagagcgactcctcgacctcctgctcagtcaggagcgggtggagcatcgtgtccgagacgagcgagaggaccggcgaaatgttctgggccggaaagtgggcctgatagaggagcgtctcccggcccatgtggcaggctaggttcgagacgtacttctccatgtcgagcgcatagtcggtcacggaccggttgctcgacgactgggggaagtagacaaaggggaagcagtcagccgccagccgcgttcatagcccgtgtgcaggcagctggcgacgccgcaccttgaaggccatcttagcgagcatataagagtagccgcgcgtctcctcgacctcgtagcgcgagccggcggcgaccgtcacgccaacagactggatgtgggcggcgacatcgttcgtcgcaaccttcagctgattcgggagcgtcgttatgcgggtcggaggctgcgccgagggaggaggagcaggtcgccagacccgtcagctcgccggtcatgcctcctcctcacacatcgcagacaagcgcacttcgacgaattttgaaatggttcgcgagagcgacggccgtccgagcgcggtcttggacgaggccgccagccgtgggagggccgcgagagggagcataagctgcaccagagaaggacccaggcgcgcgcggacgagtcagcctttgcccacggccagcgtgcaacactaaaagagcacgcaccaaaagggatccagcggaacctaggatgagactcgtacagagtgtgaaggggtccggccgtgcagaagcgagctcgtgaaagggtggcgtggtggtggaagagagcaggacgacgtcgtccgccttacgcggccgcgcggctggccgagcggcggcggcagccggcagccagggcgaaacgaagcagcccgccgcaggggaagacgacctgcgggtcagggcctagacaggcagctggccccggacacaagccgcagtcttggctgcctctatctagcatcctaccgtcatcgagcacattctctcatggccaggagaagctgcaggtcgagctggccctgcgtccagcggccggcacctcagctgcgcgcgcagcacgtcagccgacgacggctgagacgacctgcatagtggctactctcacgcagctgagctagtaaaaggacaagctgtccattcaggcagctcttctcacgatgcattcaaagtccgctattcgacggaaaagaggccgcctcgcttcgaggcactgaagcgcttcggccgtcgtctcgcgccatcctcgccgcaccgccgtcagcctgccgacatccacctcgtctcgcacacgacccgctcctctacgccgaactcccttttcgcaccggtcctcgatgacccgtctgcactagagcagaatgatggagttcccggccgcccatgcgaggtacgtcagtcccgcttcgggtcggctccgagggaccggcgggccgcgaggtgcacctcgttcgcttggaccaagcctggctcccagcaaaaatgactcggaggacaacgagctgactcttagagctaccgcaggtcaagtgctcgacatgatcaatattcgagaggtctgtcccgcttgcccgccctttacctcgccctcttccagcgctcgggacaccagctgaaggatggaccttccctctctcccctggcttctagatgccgcagcctcttccctcctcgaccctcttgagcctatcgatctggcatcccgtcctcctcctctaatactcgctccatcctccgccactctgatgccccggccggcccctctctcgcttgcgccgcggtcatttcaccctgagctcagcctaacgttcgccccggcctcgttcagctcagcctccgacatcctctcgttcggcagcagcagcgacgaggatgacgatgacggccagggcatgcggatcgacgacatcgaagaggagcaggaatcgtcaaccgaggacgagtccgggccttggaggccatgcgtccactcgcgcggctccgacgagagcgacgccggcgcgcgctccctgtcggcgagcgcagaggacgacgcacgacatcggccgccgcttcggggcaggcgttcgcgcgacctctcgagcgagtcgacagcggcgctcctcatccgccagcatcagcagtcgtcccacgagtcgaagtgctggctcggtggcggccgggatggcccgctgccatcacatcgaccgtcgccgtcacccggccaaccgacgaccatcgccggccggctcgcacccccttcgccatcgacctcaggctcctcctcgcccgaacggccccgacggcgctcgcgctcgcgatcgttccgtcgtccaggatcacccatcctcgagagcgcaacatcggcctcagacgactcgccgccgcgagccggcgagcccgactcggcgtcatcctctctgagagcgtcctcgcccatcgccacaccgaccccacctggccgctcggtccgcttcaacccacggatgaagacgcggacggcctatggctcgtatcagtcggaccggagcatcgatctcgtcagtgcgagcccagccgcgagcttcctcgcctggcgctacccgcgcaatgcccgtgctatgtcggccaagcgcgctccggccgtcgccagctggaaggcctactacggctcgctcgacagcggcggcggcggcgtctcatcattcagccaatggagttatccggctcagggtcccgcattaacgtccgcatcagcggcaggccgagggaaggatgacgaccctctgacggcggccgactttggtgcctccatctgggaacggctctgtcggccaagctactggcgttggaaggccggcctcgacgactgggccgaaggcggctgctgtgcgcttccagattggtcggtcgacgacgacgacagctggagtgtgaccaacgatgcagccggcgatggtctttctgcgagtcatcggcgaccgggcggcgggctcggctttggcgaaggccggccaggcggcatgttttgagggcttcctagcgcagggctttgtactttctagatcattcgcgttgtaaatctaaaatctcatcgttcaagctttgcaggacaggggcgagagcggttccgtgcgtgccggagaagtgaggagggcggcggcggcggctgagaaggggtcgtgacagtcgtaatggtgcgatgcgagagcgaaggcatgaggtcgatggacggacagggagccgctcagttgaggcggttctggaagaagaggatgatgggtcagccttcccacgcttcggccgtgcccgacgttaaaggccaagacgcaccatctgtcgtttagtccggccgagcttgccagccgtccggtcgacatcttggtcaaggtgatcgagcagctcgttctgctcactgatctcggtgctaatcgcctcgccgagcgtcttctgccgctgtaggatcgtctgtgggccgacgggggacggaaggggtgattagatccctagaggcaatcactcggtgcctgagcagcgcccgactcaccgacaactcgcggagaataccgtcctgctcgtcgactttggtctgctggaggtgcatcaggccgccctcgtcaagcgcacgagtctgctcggtctcgcctccttgcgacttgaccttcttcggaccgccgagcagagcattccgtgagctgtcgctcggctcatcccatccgccgccaaacgcagcgacctgcgagcggtcggcccggggcgtgacggccgcctgcttcgtcaacctgacgcagtcgtcctgaagcccgctcaccatctccccgcgccggcccatctcgcccgtcccgagcttctccttctctccgagacccttcagcgcgccggcgaggacgccgagccttgcgagcaagatcccgatgtcctttcgcgcgacgacgccggccgtgtggccgccggtcgtctggcccgtcttgaggagctcgtctcgccggccaagcgaggcgcggatcgtccgcgcgagcgcctggagcgtctgatactctgcgagccaggcaggcgagccggcgaacgaggttggcgccggcgggagcgtcgggtgctgggccgtcgtcgagggggcgtgctgcgctgcgccgccagctgggttggatgacggcaagctggccgtcggctgcaagggcggagcggcgagaaagtcgaggaaggcgtgcgacgagcggtaggctgagtccttgtgcgagagaatgtgtcggaggtaggcctccagagcgacccggcgctcctcgatcagctgtcagaagaggggaggcacggcagcgaccgtcagccccctccgaccgtcgtcggtcgtctagcggaggcacgcactgcatgatcgttgacgctcctcttgagtccccagacctttttgcccggcaagctctcaccctggaccgaccgacctacttcggcctggatctcgcgcgcgagcgactcaaagtccgaatagcgacggtcgaccgcccaggcccggacgggcgtcgagatggtaatgtggtaggccgtgtaggccttgccgccgccggctgacgtccgggtcgagctcgaggggaccgcgatcgtctggatcgacatgcagggtgtaggtgctaggcaggtggcgagggagggaggaggttcaggggaggatgacgctgtcgcttcgagcggaactcgtcctcgcggcgggcgcccagcctgcacgcgtcacagggtgtggcgtaggcggtcgacgagtgcgaggctcatgcgtgcctctctcaagcaaggtccgtatacacaggaggatgtctgtctgcctatcttccaggccgaggagttgtccagcagcagctggtgaggtaagtcttcggggggtctggcacggccttcgaggtcagctgcgcctccgtcactggcggcgctggcggcggcggcggccgtcgacccagcagaccggcatctcgcggtcgctcgcaccctcaccgtcactcccccacctcgctctctctctcacacccactcgaccggcctcagcatggcatcccgcaagaaggtcctcctcaaggtgcggatcgtgctcttgtactcgtcggccgtgctcgccgacgggtgaggccatcttgcgcccgcccactccgcctctcgagtcgtcactgacgaccaggcccggccgacgcctcctcgctccttccatttcaggtcatcatccttggcgacagcgggtgcgtctagagacagtcgctctgaagagtagcaccggagcgcgacatgctgctcggccgatcttgggtcgcgcggtcgctgatgcccgccttcgctgcctgcacccctctctcccgcctccctcgacccctcctgtgtcaccttgcctcgcccggtctcctcgccatcctccctcggcttcgtctcgtccgaatcagtgtcggcaagacctcgctcatgaaccagtatgtcaacaagcgcttcagcaaccagtacaaggccacgattggcgccgacttgtaagctgctgccctcctctcggaccccgccgaacgagcccatgagagctaacccaagacacgccgccatccgttcagccttaccaaggaggttatggttgacgaccggctcgtgacgatgcaggttcgtcttgtagaaggggcagcgggctagagcgatctcggcaccgccgctggctgccctaggcatccctcctgagcctggcactctgagatctgaccagtcgccgcgctcctctgccggtcgttcgctcacagctctgggacacggccggccaggagcgcttccagtcgctcggcgtcgccttctaccgtggagccgactgctgcgtgctcgtctacgacgtcaactcgactaagagctttgagacgctcgacagctggcgggacgagttcctcatccaggtgcgcgccgttatcaagtcaggcacatccttttgggcgactgatggctgacccgtggcgggcttggatctcgtaggccagccctcacgaccccgagaacttcccctttgtcagtctggcagccagcttctgcttcagcctgttgaagcagcctagctgacgacagtcaaacatctgttttggtcttaggtcctgctcggcaacaagattgactctggagagtcgaagcgggcagtgcgtccctctaaactgccgatctgctctcgtgcgctcggatgctaactctgagctcactttcgactcttcaggtctcacagaagcgggccatgacatggtgccaggccaagggcaacattccctactttgagacgtcggccaaggaggcgatcaacgtcgagcaggcattccagacgatcgccaagaacgcgcttcagcaggaggccgaggtcgagctgtgcgtggagcaagctgctgctctttgcgcgcgagacgaccaggctgacagcctttgcttcgtgcagctacgccgactaccctgacccgataagaattgattcggacagctcgcagaactatggctgcggctgctaggcggctcaagtgcccgtcgtcccttgcttcctacctttctgccgatcgtttcgtgcggcctcgcgttgcgtccattgtccggcgtgggcttcttgctcgaccgctagccacctcctccacgacaccgagacgctctcgctgccgcgcggcgaccttgctgtctcgcccctcccccgcgcccccttctcctttgagccctactcaccggtcgcttatccgacgtcttcactgtctctcctccttatcgtaccccctctctgccctgctcgagccccttgcttctgcgatgtcgttcacttaatccagcctgcaagggaagccaatgtcttttgcaggcgcagcagctcgccgccttcggcccgcgagattgccggagcccgcgacgatggctcggccgttcgtcctttcttcagcttcgcctctgaccatcatcaccttgacttcatcctagtctgaccaaaacgacggccagcactgctagtaacctccctccccaagccaatctcccatcggaccacctgctctgcgccctccgatgccggtcgctgccgccgcctcctcctcccgctggtccccgactcacgtccatccgtcgttcgagagccctcgagtcctcactctgacgatcagccggccaccggtcaacgcgttcaacacggccctctggcgtgagctccgcgctgcgttccacgaggtcgagcgcctcgggcatgaggtccgggccgtcgtccttgtcagcggcgtcgaccgaggcttcaccgccggccttgatcgtgcatgaagcttctctgcttctgctcgaaggcttgttcttgcgactgactggcggacggctctccagtcgccgagcaggcctcgaacgacttcagcgaacagctggccgacccagctcggacggcgctagagctgcgcgagcacatcctcgttagcccacctgtgccctgtgtgcgcccgcctgaccgactgacccagtgcgcctcctgcaggacttccaagacgcaatcagcagcatcgcagcatgccgagttccgatcatcgtcgccgtacacggggtctgcatcggcctcggcctcgacatcatttcggcgtgcgacgtgcggctctgctcagtggacgcaaagttctcgatcagggcgagtgacgcctgcctgtttgttgcgacactgtcgggctgatattctgcgatgcttctctgctgcaggaggtggccgtagggctttcggccgacatcggagtcctccagcgactcccgaaattgacgggcaacgactcgcttgcacgagagctcgccctcaccggccgcttcttcgacgcatcgacggccgaccggctcggacttgtcagccgcgtcattgcgggagggcaggccgaggttagagaggaggcgatgaaggtcgcacgcgaagttgccgccttgtcgccggtcgcgacgctggggacgaagcatctccgtgagttgtcagggcttctgccagtggccatgcgtgctgatggatctctgcctctcttctctctcgcccgcagtcgaccgtgagtgtcacttgctgtgagcatggcgcaggatcacgcccgctgacccgcattctgtcctgattaaacagacgcccgcgatcacacggtcgccgagggtctcgcatatacggcgctgtggaactcggccatgcttcagacttcagacatggcccaggtcgtcgccgcgttcaatagtggcaagcggggggagccgccgcagttcaggccgctgcaggacgttgctcaggcaaagctgtaggaggcgactttatgacctttctcagacccgtgacgcaagcaaggaagagggagcatgtacaacggtcgcgctggggctacagttcggagagcacctctagggctcagccttccggtgggccttaattccgaggggctcccagatacggacaatgcccgagtcgtcttcgcggccccagccggcgccattggcgaagaggaaagggtaatgggcgacgctcgtcatgaacgccggcgagccgaggacggccgcctcggcgaggacgatgccaatgtccttgattaggacgtcggcggccgaatacgggtggaggtcggcctcgagcatgtgcgggacgcggttggcgaacatccaggacgcgccctgggacgcattgacgtgggcaaagaccttgcgcagcggcaggtcgagcttggcggctgaccagagagtaaaactctgtcagcactggaagcagagaggaagaaggatgatctcgctcaccaaaggccatagcctcggccagagctgcgacgtgtacgccagcgcagagttggttgaccatcttgaccgacgagccggcagtgacaccgccggggatgatgaagaggcgctggtccggaccttcggctgcaagatttcgggcccggtcagccaacacggacagctgagatggtcgactcccaggcactgaccctgctccgtcattgcttcaagcactgcccggcccttggcgatcgcagcgtcgtcgccgctggccatgacgctcaggtcgccgtttgccgcccgaatagttccgccagagacgggagcgtcaacgagcaaaggcttgttctggagcgatccgagacgatgcgaaaggacaagtgtggcggacggcgggcaggtcgatgagaggatgacggtcgcgcccggagcaaggactgaggacggcagctcagcacggacccgccaacgaggcgcaacaagactaggactcacggtgtgcaatgccctcgtgatcgccgcttccatcgtccttgccgagcaggagctcggtcgcctgatcaatcgagacgaccatgaggacgacgacgtcggcgccctcgcaggcctcgcgagcgctcttagccggcgtgccgccagccttggtgaaggcttcgagcgagggcggatagacatcgaagccggcgagcgggatgccagctcggacgattgaggcggccatgccctggcccatggcgccgaggccgaggaaggcgaccttgctgactgacgaggcagacgacgaaggaccggcagcggcagcagacgaactgccagaggcaccctcagccggctgctcggccgccgacgtcccaggggcgatctttccaccgctcagagtctggaagaagccggcgagcgagacggctgtgctcgcaccgggcgtcgcgaacggccgggcggcgagcagcagttgctcggcctgattggcgagcggcgaggggaacttgagcgcgcgggcaaccgacataacttccgccgtctgagcaatctgcagaggccgagcatgtggtgtcagccgatggacaacctcccagaggaagcgcgctggtacgtacaagcgcgtcgagcgcagcgaccttgccctcggtctggccgaggatgagctcgcggccggcggcggcaaacatggccgagttgcctgccgcgccatggatgacggtaaagagcgtgccgagatcgatacccgtcttggcgccgagcgagagcgcctcgagcgcggtgacgatgtggatcgcctcgagctggtcaacagtgaaggtgagcttcggggatcgccggcgggccagccgaaggacgcaccatcgacgagacgaggctgagcttgcgctcctcggacagttcagaggcagacatgacaggcggaggttgctgaagagggtaaagggactgagtgatggtaacgagctagcttgaggccaagggagagagagggagtacagtcgcgggctcggtgcgatgcttcgggccgggtcctccgggcccctccccttcgactgccggcacgatagagagagggcccgacgcctttcatcatctcaaaccaccatctcctcctcctcttttacctcacgctcgcctaagctctcgtcatgtcccttcccgcgaccctgaccaacaacaagacgctccgcatcctgcgcgatgccgaggctggcggctacggcgtgtgagtcttcaacctctcgccgcttctgcgcccgccaagccctgcctgccccaggacgcttgagactgacaagatcgcgagctcttgcagcgtcgccatgaactgctacgacctccagtcctgtatcggtacgatacgggcggccgagaagctccgggcgcctgccatcatcgaggtgcgttgaccgacctcttctgccgactgcggttcagctcgcgcccgcctctcgtctctctacgacatgctgacctccgtctcatcggagggcaggtctttccggtctggctcacctactggggcaaagccggcctgagtgcgttcgatccctcttgctgctccttccaaagagccggctggtgccggccagctgttcgctattggaggatctccttcttccccgcggccagcgtcgtgccccgcgctctgccggctccgaagccgtagccccccaacctgacgaccttgacgcggttcatcttcctttctcctcacagaggccctgctcatgctcgccgagcaggcgacggtccccattgccatccatctcgaccacgcgacgaccgatgaggacatcgaccgcgcgttgacgttcgccgaggagggtgtcgccttcgactcgatcatggtcagtcattgcaaaggtagaacgtcgtggcaactgctgacttgtatttaattgtttctccaggtcgactcaagccatgccgactcggacgacgagaacattgccatcgtacgttcgcctcgacttgcagcaggcgctccgcctcgggactgacgcgacgcgccctcttcttcactccgcagtcaaagaagcacattactcgcgcgacggccctcggtatcgcatgtgaggttgagctcggcaggctgggtgagtcgcgtcccttcagatcgagctgctcctgcgctgatcaaatgtccttccgcgacttgcagagggtggcgaggccggcctgcgagtcatcgccgacggccagctgacggaccccaagaaggctgagcgtttcatgcgcgagacgggcgcgaccctcctggctcccgtgagttaccctatcgtccagtgctaccaaagcaagtgggccccttgctgaaccgcgattgactgcgagcggcagtgcatcggcaacctccacggaaggtacctgaagcagcccgagctgcggttcgacatcctccgcgaccttgacgagatctgcaagcctgcaggccattacctcgtcctccacggtacgtcgcctcgacgtttcggtcctaaggcgtttgatgctgaacgcatcgtctccctttcaggtaccgacgacctaaaggaccccatctggctcgaggctgtcaaatcgggctgccgcaagttcaacatcaactcggtctgtcgctcatcgtcattgaggctgatcgagtcgacggctactgacgacgttacctctccccctgcactgcaatatagtgggctcgcgacccgatgaacaagttcattgcagaggagatccagaaaggactcgaggctgcgcctggcttcaagggcatgccggacatctacgacgaggcctccgacatctactctggcgtcgtccaacgcttcatcaagctgctcgggagcgagggcaaggccgcctgagacggacggtcgatctcgcctgttgtagtgtagccatggacttgaagtcacacctcaccttcttcatcagccgctcgacagaatctacgttcagtcatgacaatagcggccgtgccggcccccggggagagggaaagaaagggtggaagggggggtttacaatgcgagcatggccgtcatgtcctgctctgagacgtcggcgaggagctgctgcatgtcgacgtcgttctcctggacctcgggcccgcccgaggcctgtccgagctgccggacaccgtcgatatcgacctggccgacgggcgcctcggctgcctggccgcgctggaggagctcgagctggctctgggccctgccgacgagcccctggacctcggccagctgctcctcgaccttggccttctccttgaagacggcgagcttggcgagctcgaccgcccggcgctccgactcgacgagctcctcgagctgctcaaagtggttcatcttgagctcgagcttcttgagctgagccgagacgagccgcgagacgagcgcctggatctggcgatcctcgtttgccgcgagggtggccgctttgccggccgccgcaccgagcgcgaccccagccgccgctgtgacggccgatgatgacggtgccgacgtgagcgtcgcgtccgctggcggcgctggcggcactggcgacgcttcgccgtccgcttccgacttgacgcctggcgcgtcctcggccttgtcgacctccatgctgctgctggcctcggccttggccttctcgccctccccgctcgacttcttcaggtcgccagtgagctcgccgagcgccttgcctgccgcagcggccgcaacggccgggccgaccgtacccgcaaggaaggccacgacgctcatcaccgggttgtccgacttggagaacggcaggccctcagctccgccggggaggggcatcgcccacttgagagcgctgaggtcggcatccgagcttgcggccgcaacgtaggggtcctcgatgggcagctggaggaacttgaggatgcactggtccttgacgcgcgtgccgacgtggtcggcgatcgccgtccagtcgtcgtcaaacatctcgatgccttcgagcagcatgagcgtctcctggtcgctccactcgtcgccggcaaggccgtccttgccgccagattgggcgccgatcgcgtgcttgaaggcagcgtcgtccacgcggagaaagtcgcccgagaagagtgtcgacgggaagcggccggccgtgtaacacggcgggcagatggcaaaagccgcgtccttgagcgactggtagcggacgcgcgtgcagtcggacccgcagacatcgcaagcgtacgccttggcagaggccgtcaaggttgcgggcgggaagtggagcgccgtgtttttccttgcgagcgcctcggcctcgccttccggcagcgagcgcgcaagccccttggccgtcgtctggtagaccatcttgcgcaggtcgaggttagccggcgtcggcttcgcgaacgctcccagcccggtcgacgagcttgccgccggctggcccgccgttttgatgcccggatgcaggggctgcaggcctcgcggggtgtcgagcgtgacgcggaagtgaccagtgaacggcgggccgagcgcggacggcttcgtgtcggggtcaatctaggaggaggacgtcaagaaaaagtcagcacgttgacgaggcggcgagcgaccggtcgaggagcgcacctggtagttgatgagaccccactgctcgaggaaggcgtggacgcgcatgatggcgcagacgtcgccggcgaggttgcgccggcacgcagtcaccgtcaggtactcggtcgggttcagccggtacgtgttgatcataaagtcgcggtagtccttgtagatctgcggcgtcttggaccggttccggttcgaaaagaactcaggcagcgaccggcgctcgaccggattgatcgtcgcaaactggaaccaagacgagtagctcgggatgatgatggcgtgcgtctgggcggcgaggtagttggccgcccgtgctcggagcgagggcaggtcctcctcgtcgtcgtccgagggcgcctcctcctccgagacagcccccgtgccgttccctgtcggcgctggcgacgacatcgaggcgtctgggccgtcaagcgagccgctcagcgacttgagctggacgacatcaggcgcgctagccgtcgaggactctgcgagggtggcagctctagggtcagcgcgcaatcattatgtcggcccgccaatccgacaccattcgccttcgcacaaggcggcaaccagctccggaggcgaagaaatacgaaggccggtacgctgcgagctcaagctgaagcttgagctcgagcaagacgagaggtcggcggagggaggagagggcactgaccgccttgcctgctgctcgactcggcgccatccatcccgttgctgatgttgccgagattaccgctgtcgatcggcaccttctccttgtccttgcccggcgccttgtctggctcgagctcctggaccgcgccggcgtcggtcggctcgtcgcccgcgcggtcgttggcaccagcggccgccgccggcgatgagggcgatgcggccgagacgttgagcttgatgcgcttgttcgagtctgccacggggtcgtccggcccaggcgagggagccgcacgtttcggcgaggtcgacatcgtaatgggcggagagcgggacagctgcaagagatagaagagagggatgttcgagctcgtcggacgcgaggcaacgggcatcgggtcgcgcgcgcgggcgcgtcccagctgaaacgtccgctcagggcggctttcaagaaacccatctaagtctctgctccggacaacggcacttgtcgctgccggtcaaggacttgttgcgagcaaggtcttcatggtagatcaggcgccggacgacgctctcagccgataatgttgccagcgcgctctggcccgccgagccaacgcgcggcaccgagcaggaaaacgagcaggctcaggtcctggatgaactgcgtcccgactgagaggtagcgcgaggccgtgtacaggtacgtcttgagccgtggcggaaggagcgggaggaacggtgacgcgagcgagagcagcttggacggcggaggccgggactgggcaggcgagcaacatggatgcgcgcagggtcagcgggccagcgactaatcgagccgcagaacgacgacgcgtagtcgagaggcgtacacggaagagcagcgcgcggctggtctggaggatgagcgagatcgtcacgaatgcccaaaagacgggctgcgaatcggggtgtgaagcacatgcgcgaccgtcagcactggatcgcaagtgatggcggggttggcagcggggacgtacgagctcgactccggtcattggagccggtcgcttgtagccgccgaggtcgacaaagttgtcgcctccgcgccttgcccagacggcaggctcccaccatcgaaggacgaacaacacgaggccgacgacgccgagggcgtgcgcgaggtcaaagagccggtcgacccgcgtctttgcgcccgagtacggctgctcgagctgctgctgaccgaattcagcaggaaatccgccgccgccggggccgccgcctcccatcgaggacagcattgcagcgaaagggtcggcgaaggggtcctggccatcggtgccaggagcgccatgaaagcccgaaccaggcccgccaccggcctgcatcgcctggagcatggccgcaaagggatcgctgcccggcggtccatccgcacacgacggcgggaagcccgggaacatctcctccatcccggcgaaagggttgccctgctgctgccggccggccggagctccaaccgtcgcgagcgagctgctcgagtcgttcgtgctcggcaccggtctcggtgcgagaggcttggctgcggacaggcggcggggcgctcatcagcactcaacaggtcggcaccgggcgagttctgacggcaaggcacgaaccgtcctcgtagagctttgcgccctcctctccacgggccgtgttggcaagcttggcgagccggtcagccccacgggcctggattttagccttgcgagcctcggcacgcagacggctggatgacgagttgggaatcggcccgacgaggtgtcagcagaggatgatcgcagtcgggcgagggtgggtgatggtggggctcacgcttcggatggcggcggcggggaagacatcgtagatctggagggcagagtacgagagaagcagggtcagccatagcgtcgacgatacgagccgcgcgctcgctgcttacaatggagggcaagacgggatggatggtcggaagtcgagctcgcgcaaggtccgacaggtcgacgtcgggttggcaagtgccaggctagctgcgcgagacgccaggctcggctgccctctctgggcgtctccttgaagcagctgaggctgacctccttccgtcgacatctcctcgccggtcgccttctctcgaacaaaccgacttcagagcattcgtacgaagctctggctgttcactactatctccgctctcgcagtcaccgcagctttttgcacgattggaccggcgcgcgcgcttcaacgctccgctacagccccgtagcctccgacctcctctcctcactccggcccagtcccggttcatctctgctgtcgctcgcaggcagactagccgtgtcgctcatgtgcgtagcaattcatgctcagtcatgaccggtggatagaggcaatctttctggagacgccaagctgatcagcgccgcctccgtcactccgtccgcagggtgtcgcctgctcaggtcgaactgccgacctgtcggtccctcctcgaaccggccagttcaggttcagctctgcccgatgctgatcaagctcctctttctttaaccccctgtcctgtcgctcgcctctcggatatgcccgccttcttccgcctcggccagcctccatctcgctgaggcattcgagcacgaatcgcgcagaggacctgcccgagctccggcacacggtcaacgcctccgaggacgtcatctcgctcggtacgtcggcatctcgcgcagctggcgctggtgctcttaagctcacgatttctctgcccgacctcttgcctgcgacgcagcctcttccgaacgctacctgttcgctggctcgccatcgtctgtcattcgagtatggaatcgcgagagctttgagccagtcggcaagctcacgggtcacacaggctctgttgggtgtcttctcgtcatcgaggacggctaccgacgatggcttatcagcagcggcagtacgtagcgaagcacaagggtcaggcgtttggcgcgcactagctgaccgctccgcccgtgcatgtgacccaaggtgactcgacgatccgtctctggtcgctcgacacgctccggccgatctgtatcgttcagccagccatctcaggccggatccactcgctcctctggtgcccgcttctgtcgctcttgtactttggctcgcagtcgaccttcatccaggtgggtcgtcctcccggcgctctggccttcatatctccaggctgacatccttggccctgcagtggattcaccttcccgagaatcctccttctccctcgataccgaccttcccgcccctgcgcacgcccgagccccgccagtcgcgcttctttgacagccaccctccctcgggaacctcgacgcctgtggccgcgccgcccggctcgtcgtcgtcgctggcccccgagaaggctgcgccagaggtgccgacgctctacggcgagacggagcactcggtcccggcccactggggctacgtctacgcgcttgcctgggtcgaggacccgaagcgccagggcagcatgtggctcgcgagcggcagcggtggaggggatgtaaaggtgaggcttcgatagcggccgctttattgcgactgcaagggactgacgcgccgctgccccgctccccccggccagatctgggatcgccaaccagacggctcgcttgaccttctgacgacgtttggcggctcgaccgaggccgtcctctcgctcgcatcggtccacacgaccctatttgccggtctacaggacggcgcaatccaggtctttgacctcgagacgcggtcgctcatccgccggctcgtcgggcacacgaaagccgtcatcgctatctcggctgtcggcaaggacatctacagctcgtcttcggacggccagatctgtgtgcgtcctgattcaggcttttgatatgttgcggaagggcgccatcatcctcgtcggctgagaagtggattcatccttgggccgcagcgctggaactcgtccttccgctgcacgagctccttcctcgcgcacggtaaggccacgctctgtacggctgccggtccggccgcgcactcgggctgggagctctactctggcgggagcgatcgttgcctgcacacgtggagcgtgccctacacgcggaccgacagcggctgccagcgagggtgtggctgcgagaagaaggaaggtacggccctgcaagctgaagtgcagcatacgagtcccttggcatccagcgctgacgtcctgctcttccccttagacatccttctccacatgctggcgagactcgtctcgtttccgaccgtgcccgaggagacgcatcgggaggattgccgacaggcgtccatctacctcaagaacacgctcaagcagctcggcgcggccgacgctgccctcctgtctggcgcaccgggcaagaatccgctggtgctcgcgacgttccgcgcccagcagcccgagcagatccgccgcaaacgcgttctcttctacggtgcgacccgagttttcttgccgacaattggggaagacctgctgaccgagcgaggggttctgtgtcgcaggccattacgatgtcgtcgctgcggcggccgagaactggacctcgagtccttgggagctgacgccacgggacggctacctctacggccgaggcgtcgcagacaacaagggtccgatcctcgcgatggcgctcgccgcttcggccttgctcgagcgcggcaagctcggcgtcgacctcgtgatgctcgttgagggtgcgccgtttcgaaagcaagctggtttgtgagagcagggctcaagctgacgattgagcaacccgtcgacaggcgaggaggaggcgggtagccgaggtttgtcggaggctatcgagcggcatcgagtgcgtccatttcgacctcgcccatctcgagacgaaacgtccctgaccggccgtgacttttcttcttgcaggccgagattggcgagatcgatgtcgtcctggcgagcaactcgttctggatcggagaggagcggccctgcatcctctacggcctccgaggcgttatccatttgtcgctcgaggtcagtcccgcgcaagccccgccgcgagtctcgaccagcccgctggagacttcccgctaaacggtttgccgcaccgccccctcgcagatctccagcaacaaggtacgccggcatcccttcacactgtttgcatcgtcctgcccccggcttacactgccgccccggctcacaatgccgccctgttccttgggctcgattgcgtcgcttcttacgcagcccgaccagcacagtggagtcgagggcggggggattcgcgagccaatggtcgacatggtccgcctgattggatccatctctgacgagcgcgaccaggtcaaggtccctgccttctgttcgtcgaccacgaaccacctttctggcccggcaactcggagactgacccgctcataatgcagatgaccgcgtgcgtccgatcggcgcggccgagatgcagatgtacgaagagctgtcgctgcttgccggccgaccggccgagaacctgaagcagcgcttctcgctcccgagctactcggtcgctcacatctcggccggtaaccggcgaggctcgagcagtaggtccttctcaagcttaccctgctgcttctgcgcacgcccgcgtgctgaccgtagtctgtcgcttcacaggcgcgaccgtcattccgtcgactgtgcgcgccgccgtctctttccggctcgtgcctgaccaggacctcgacgagtgagctctggctaaggctggatctcgctgagcgctgtcaggctgaccgaacgcggcgtctgcagcatcgcacgctccatcacggagtatctcgagcggtcgtttgccgggctccattcgcccaactcgctcacgctcgagatcccgcacagcgccgactggtggctcggcgacatccagtacgtcctcttggccggcaccgctttggctcaccgccagctgacctcgcgttgcacgaccctacagctcgcccgttcacgcgctcatggaagactgcatcagcaccgtctggggcgtcgagaagggctcggtcctgcgcatccgcgagggaggcgtgagtgccggtctctcggtcgcatcactcgcgcagaaagctgactcccgtcgtgcgcgcgaccggcaattcgcagtcgatcggcagcatccctctgctcgagcacgcacttgatgcgccctgcgtgcacgtgccgctaggccagtcgtccgacaacggttcgctgaccttgccgctttcgagcctcgcccatcagctgaatgaaacgaatcgtcctgtatcgtctcctgccaggccacctgcaggacgagcgcatgcggctcaagaatctgctcaacggccgagcaatcttctcgaaattcgtgcgtccggcgacctagagtcctcgaagacgaaagccaagcctgaccatccctcggaccgttttacacagctcgaggacctgccttccctcggcgagggcagcgttgtatgatggcttctcgcagcaagactctgcctcgaatggccgtcggcacgcgtcgcgcgccagacttaagcgccgcgccaagctgccaaagctgcgtgcgctcggtcagcagcttggcccgcccaatatctgtgagcggcgcaggaacgtctccgcctttcgttgagttggccgactgcttgtcagaccagagccggcgtctgttaacgaggcgcgccctcgggcggcagtgcgtcaacgtcttgttcggccgacgacgagtcgcaaagccgagaccttcgcgggctcgccggccttcgcgagctctgatcgacctgatcgcgcgtccgaaggctgcgcccccccttctcaaaccatgacgtgtcgactgcgaagggcgccgtcgctttccccagccgttgcttgtcagccgacctgccgctctgctcggcgccgtgctcggagtctgagcatcgtgccggccggatgagcacgccggccggcgttgcctatcgctttccgccgccggcgcgcgcgaaatcaagagttcttttagttggtcgcccggccgacgagcttggtgtgtgtgctgagctcagccgggctgcttgcgaccgtgcccgcgctattcgcaagagaggataatcacgatgctgccgtgcctctccccggtcccttccgctccctgcctgcctgcctccaggtcgctgaaaacatcacgttccaataggcctgggaagagcggtgacgtgcgcagagaagggcctcctgaaactcgcaaccgcgccgcgcgcgcgcgttcgccgctgctgcgcaacctggcccctctctctcgtcggccggcgcggaagacgccggcacgtgtctggcatcacactccctttctcgctaatactaaaacagggggcaggaagcagccagccagctcgagccggtccgcttcgcagcgtcttgttctggcctcgtgacgcttgcccgcccgcccgctcgctcgctcgctcgtcgtcgttcgagacggctgggccgccgccgcgtgtttggcggcctgccggccgctgggaatcaacccccctcgccgcaggagtaccaggctcccgggtctggagagcgtcgaacggcagaaggcactaccgcgcacaaggggagaccctggagaggggagctgggaaaacgcgggccagcatcgagacgcttcggcagcgcccacggttcccgagtcgcctctcgctccttgcgagcgtcgcagtacctcccacccaccagcacccgtccatctcgcccccctctcagcagcccctcatccctgcccgagctcgcccttgcttccaacccgcccttttcgtcccccgcgccgcgcccgcgcgcccttcgccctctgcccgcgcacccgccgccgtgctctcgccgccctcaggcgcccttcccgcccaccgccggccggcgcctgcagccgaccgaacccctcctcgtcctcgccccctcgcgcagccggtccagcgagcgatggtcttcggccggccgcaccacttcgtctcgggtcagtggaagggcaaggtcctccggtccgtctcctcccctccgactctcctgtcgcccttttcctttccctcttgcgcactgtcgccgaaatccctgcgtgtggtcggacctgaccgccggatttcaccatcctcctcttcctccctggttacgtcgacgccgcacctcgttcccccagattttcgctcgaggcagcccagagcccagaggtcggccgcaaggtgagcgacaggagccaagagcgaccctccgggcttccaagcggagcttccggcggctggtacagagggaggctgcgctcgaagacgctgaccagccctctctctctccctccctcacgcgttccagtcgagcgtcaaagaccgccggccgatcacaaacatccccatcgtccgcgtccgggcatgcgaggttgaccaggcgaccggcgttgagaccgaggtcgacaccgagtgcgtccgagcgcgagcgcgtcccgacgtcgccggaagctgatgccctcgcccgacgaccgcctgcgtcctctttctctctcctctcctgagcaggaccatcgacattgccgactttgtcgtctcggccgagctctactcgcccgtctcgtccgggcccggcagcaacgcgcagccgggcggtccctcatcttcgtcgggcgcgagcatgagtgcggcgagcggcgccctctcgccgcccgaacgccggagctacttttcggtcgtcagcaaggtcggacagacgtcgcttgtcacgcccgagagcgccgagtctagcggcagcgtcagcctctctggcgggagcagcgtcggtgccggcgtcgcgagcgggagcgggagcgcgacaggcacgagcagcggctcgggcagcggctctgcaccgccactctcgccgacgtcgagggccgaacgaaacatcctcggcagtgagtcgtctggccagactgcgggaggccgacgcgtgctgatgcagagaacccgcttggcagacctcgcgacgtcggccgtccgcctgaacgacctcgaagggacgcccgctatatggttcttctatcacgttcgtccagagttgaatggctgccgcagtcgtctctcgagcgctgacctgctgcccgtcttacaggacattgccatccgcgccgagggcgactactcgctccgcttccagtttgtcgacctcgagagccggaccgaggaggtccgcgacgacgcgccgatcctcgcagagtgcttctcggagcccttcacggtccatgcgcctcggaagtgcgtctctgctctgccagtctcagggttgcaagcaagttgctttgacaactgacgccgcatacactcgacttcctccgcagtcatccgggcgtcccaccgacgactcgcctgatcaaggttcgttcgtctctagccgggctggatcctcgactgggcagctgatggtcgatccttctcctgtcgcgcgcctttccttgcagcacttcgccagccagggctaccgtctgaccgtcaagaagcccggaacggccggcggcgatgacgacgaggcgagcgacgacaacctaccgccgacgctcgtccagggcggcgtcggaggaggcgagaccgagcaggagcggaacattgagcgctgatcgtcgggcggctccctttggtcgactatcgtctctgtctcggcgcttctctcctactttccaccaacgagccctcagttctgccgacggcccttgcacgacctgcaccgaaactcaatcgcaccacacacgtacacgcacgctaccagcctgagacaaaaaatgaaccgcggtacccaggccgtcgtcccccccttgttgtcccaccaacccgccctgtcgcgccgccgacgggaccctatgcacgccgcctatcctagcatcctgcgccgccccctcactcccctcccacgacacgtatgcgtttcgtaagacgtctgggcgtcccgttatcccccctttccccctcttattttgacgactcgactctgaagaaacttgctttggcttgggcgcccctgatggcgctttgacagaagggagggcgtctggcgcgggaagaggggggggggcgacatcagggtgctcgctgcgcctcgactcgccctccctcgtgcctgccacttcccacctttcacaactggcccggcctcccgtccttgtctccggaggctcacctcggcgtcgcgcactcgcactgtcctccttgtcgctccgctttctcaagagagcaatcgcacgaacagcggccgacggcccgcaagctgacgacttggcgtcgtcgactttcgctgcgctcgagctcgaagctcctgaccactaccaccgacgacgactgcccgtccctctctccggctcacctcggacccctccccgcctaggctcgcccgccgccgatggacccagcatgacgctcttcgtcccccgcccgaccggcgcgccccttccgccggcacacacccaccgggcgcttcacctccggcagctctacacgctcctccacctctgcctgctccggggcgaccatgcgcgggcgagggcggcctggcgcgtgcttgtcggctgcaaggagatggactgggaggatctctggcggataggctttgggctgaacgctatcgttggcggtggcggcaatgacgaggacgagggcggccgccagctgaacggttcggcagccgagcagcagaaggaggtcaaccggcgaaacggcgactacgtcgagggcctcatgcgcggcggcggtcggatggtcagtttgcacggcttctagcgcaaaggacacagcgagccaaagcagagctgacgtctcgccgctcttattctcgcagtcgatcccgctcctccagcagcatgtcaaccacctgctcgcgctccggccggccgagcccgagcaggcgctcgagcggctcgaaatcttcctcccaggcctgccgtacgcccagagcccgacccttcatgcgctcgcgggcatgtgctcgctcatgctcagcgtccaggaccggtcgtttggaggtgcattgacgtttgcggagccgagagccgaagccgctctcgtctagtctcctatcgctgaccctctgtctctgaaccccgctcagctccgccgaacctgacccaccaccgccaggcgctctcgtacctccaaaaggccatctcgctcctaagcgtgacgaccgcctctacccaggggacccagacgtcgccgcccgagaaccggacgttctacacgtcgctcctccagctcgcgcaggacgccgctcgctggggggacgacgagcggctcgagcagcgcgcagaggacgagggccgcttatcgaagccggaccatcggaggggtgcggcgggctcgagctcgagcgcgtcgccgccgccttcgggctcggaggctagccggcggcggacggcctacgacagcgacagcgacggcgagacggtcgtcgatggcagcgccggcggctacgaccggcgccgagtcaagcgcgagcagctcgcgcgcgaccagagcctgtcgtccgacccgttcgagggcggcggttcgcgcgacggcagcgtgcattccgacacgagcaccagcctggcgagcggcgcagaaaagaatgcaggcatggccgactcggaggcgccgtcagaggcgggcatggcagcgaaggaggcgccgtcggaggcgggtgtcgaagaggacgtccctggcgacgacgacgacgacggagcgtatgacatggatgaagactaagtcgacgacgacgagaggccgtgctagtcagcagaggaagtcaggctgagggcgccgcggcagccccgccggtcacatgcaggtcgccagtagtacgctcatgaaatcacgcgctcggcatgatgtcttcccatctgcaaaaagtgtcgaaggaacggacgggtcagcctggcgaggcgcgtcagcatgggttagaccgaaggacgcacgggatgtgggccgtccgattgaagtcgtgccggatcgcagacgagacggtcgtcccctcccggtagaagggccagacctaggtggattaaagagcgaggacgtcagcgatcgaagggtaggacatccgtcgaggggactgacctctaagcggtcgcccttgtgatacgggctgccgggaagggtgaggagagtcagtctacctagcacactacgtcgcgatcgagcgcgagcacgcacaagcagacaacctgctccgggtccttgaccatgctccagtcaatcttctcctcgagcggcatcgctgtgctcggcgcgtggcgaaacttcttctgctcgaggtcggccagcataccggcgacgccgcctcggcggacgcgctgctcgatatagtcgctccggtagccctcctcgtcataggtgacggccacccgggggacgagcacccagcgcttctcgccaatcgaccaccagtcgcgggcgacgagcttgcattcggacgcggcgcactcgccgtttgcctcgtcgccggcccggaacttgatagcatgcccgccttgcgatgggggaaggaacggctttgccgacagcgcaatgacgccgttccagcacgagtagaccgggagaggcaaagccgcccgccagcggatgaggtacgtcgggtccgagtcccagtggaagagctcgcggacgccgtcccggagctcgccaaacatgtcgacccgaggtcggagcgggaagccctccatcgagcgggtgacccagtctggcaagaggttcggctcagcgtcagtctctggccccaaacagtcggtcgaggcccatgggcggacgcactgtcgtaaaagcggtagttaggactgaggtagcccttcatccagctccagagcgtgccagacggcgcgtctcgccagtcgaggccgcaggttgcgctcgcgtcctggaagcggcgctggtggaggagctcgagcacgtcggttgggcagagaaagatgtcgttgacgaaaatgaggtcggtcggcagcgtcgggtgccgccgccgctgctcggccgtcagacgggagctctcaaagagcggcggcttcgacggcgagtagtcaaagaccgactcgatcgcgacgttgcggtagacggcgagctgctcgatccggttgaccatccaccagtcggtctggtgcgagtccgacttgattgagtgggcgacgccggcggccgtgagcgcgcgcgcaaagtgcgagagcagctcgggcgtcccgtcattactgccgttctcaaagatcgcgacgtggacattgctcggcccgagcaggccggcgagcgtcaggagcgtctcggtcaggtgcgggatgacggcccgcgaattgtagagattgagcgcgaagtagaagccctgcggctcggcgacgtacggcgacggcgtcgcagagggaaagaggtgcgagtagcgggcctggagcagagtcggccggtcggcacggagcgacgtaattgccgggcagctgacgcgcgactcctgccgagggcaagaggcggcgagcaggtcagcatcttcgagcctctgacggcgagccccgcgtaggtcatttgacgccgcacctcaagcccggccgcgctgtagcgcccgctcagctccttcttgacgttccagattgtcatgtcgacatcggtcgggtccgcagtcgtccaccgcgggaacacctcgaccctcggctcgacgtcctcacccttgccacggaacggctccgaaaattccggcggatgggcctcgtacgtccggaaggcgttggtgatgatggcgagcttgtagaggacaaacgagataacgacaaaggggatgacgatcccggagaggacgaggatcctaggaactggcgataggtgccgcttcgactggcgcgaaaacggcagagccggcatcgtcgacagcagctggtagcggcctgagcgcatagtagccggctagagagggcgaagcggagacgtcgaggctgagtcctgagtgaggacaggaaggcggcctacgacgaggtgggtgggttgcggcggagcttgcgccggccgagggagttccgagctgggagacgcctctgctgttgaagacgaaggccgagcgtcagcgtcgccgactaagaagggagaaccctcttcggagcctcgctcgaggcctgcaacaggctgagcgaggaggagcaggcgagcgggctgacgcgtacgtgggttggtgaccagtgccgagctgaggacgcgcgcgagtcgggcgacgacgggtggctcgagtgtcggaggacctcgatgcgagaaggcgacgagctgagtggccgagtgctttcccttccgtcctgcgatgcgagcgaaagaaagagagagggtgaaagggagctggaggtcggagcgaagcgagaggtggtccgcatatggctctcggcagccgtcagagctgttgcggccaagcacgaccgacgcgccggccgatagcctcgccttcgtccatcagacactccaatcgcacagctgaaccgctggaggctggtattttctctcacactgttccttctgatcggctcagttttcaagctcgtcttggagcgagagggagaggctgcctgttgcacgatttgcgcggctgcggaggccgagagggggcgatggacttcgacggacgcgcccgcagtcagtcagctcatgagtaccgggggagggtcgtcagactgtccagcaaagggtcgctcgtctagggcggtcgattcctgtcttatgagtcgacctggcttgcatgcgccgccttgtatcgggcacgcatgccctccgcccatcgaccccgcggaccgcacgatctctgcgaccagacggaggatgacctgtcgcccagctgcccttgcagggggctaccagtcgatgagacgagttagcgcacttgcgaacttcagcattgagtcatcaagagggtcattgatagaatcgccgtcgtcgcctccaactcagtagtcgtcctcgctgccgtagtgcatcaggtcgtcgccaaagtcgattaggtctggccggtcgccggcattgttcatgcgctcgaggtcccgaccgaacgcctcgatggcgcgcatgtcggacggtcccgctcgacggccgctgaaagtgttgcgacggccgaggtctggctctggcgcgaactcgtctgccctccagggccagggctcgtcgtccgcaagcgagcggaggaatgccctgacagcgtcggctaccgaaccaccggagggccgcggcagggccggcagcagcggaccgaagcggtaccgagggctaatcgggaacggatgggcgtgcgagtagaagcagatgtcgcggaaggggcacttgggcgcgcgctcagggtgctcggcgagcgaggcggcaaagtagctggacaagtcagacggcgagggaaggcgggtaagtctcctagaacaaccaccggaagccaagggtcaccgacgaaccggcactccttcttggacatgttctgcttgtagcggtcgacgagcgcctgcttctccgcgccgtccgggaagaagcgcgagctcggcgtgacaaacgtgcttcgcttccggcacattggacacgtcttggccgcatcgcgcgattcgccaccggtgttcgagcgccaggattggaggcaggtttggcaaaaggcgtggctgcagcactctgcagcacgcgcgagaggatgtggcgcggtcgagatcagcgtcttatcaggtgacaacgcttgagatggacgagacagaccgaggaggccatagacctgcggccgctcgtagcaaaccgcgcaaggctcagggccgtcgctcgagtcgtcgtcgggctcctcagcgctggcatcggaacaggcttctcccgaggcagcgacccgcgcagcagcgtcgccggccttaccagcgaggatgtcgttgatcgtcggcggggtcaggctgtgggcaaagaggcaaccatcgccacggtggcagaagcctgaagatgtcgaacgtcacagacagagaaacgagatcagtgtgcgagagcgggaagcaaggggccgcctccggaccacccccttttgatgctgacgggacggcaccttcgacccagaacttgcagctggtcagctggcgcttatcgagctgcttcaaaacctcttctcgttccagcgccgccttctcagctgcaatccgttcgcgcttgagccgctggtgcttgcccggctcgagcgggccgaccgagccttccgcttctggaacaaggagatgagcaacgacattgcagcagaggcgtcagtccggcgactctctggcttctccgagagcgttcgtacgcaccatgtacgtagcgacagtcgtccgcttgtgggcagcctgccggcatgcgaaagaaccggcagagaatcgggcgtggaggtatcggcgtcggtcgcttcgtccgctgcgggacgctgcttccaccgaccgtcgacgacgctacgggctgctggccgaagtcgaccgggagcgggccggctggtcgcgaaggctggaagatgagtgctgctgggttgagcgtcatgttcagaatggtggtgagactgctggctcaagagatcaggacggccgacatgtcagtcgagcggcagagacggcgaccacgagctcgtgcaaggcaacgtcggctctcgctcgaccaccagcatctcgcccgactctcgcccctgacctcgtctagcgacgcctcaaagctcgtgctagcgcctgctttcactaaagcaagacttgtgtctgcctgtccgacctctcgaccgtcgttcaaatcacctcgccccaccgctcggccagctgcctccggcttctcccctccccggtgcccggccagtcaactcgctcaaccgaccgagcgaagcagcatgtctaccgtcgcaccgcgtcctccgccatcgtacccgcgctcgcgctttgcagcatcctcgcctttgccagcgttcctcaggctcgtcaccgccctcatcgtcgtcgtcctcggcgccggcgggctcggggcgtacgtctggtcggtgcgtccagcgtgcactcggatccacctgctcccttaacatcctgctcacctgtgcgagtcccccgagcgcaggtctttctctatccgcgcattatccggaccaaagcggcgagagaggtgctcgaatcggaccagtctgcccggttcgaggctgtccagcgccgactgcggctgctcgtcggcatccgtggcgggctgaagacttccgtcgccgacggtgacgagggagaggtcgccgtcgttgcaaaggatagtaccaaggtcgacgagtcgggcctctcaaccgaagaggcggcgacctcgacaggggagaaggtggtcggagatgaccttctcgctaacgactctaccgcgctcgctcgcgccgacagccgctcgcctgaaggcgtcgatcaggacctatttgcgctgcccgagtcggtccttctggacctttcgggtgcgctcccgctgctcgcaccgaggccgcggcccggcggtctgcttcggtccctttcgacggtctcgcgaacatggacgagcgcctcgctctccttctcggccaagacgtacgtccgcccgttgcacttcctctgccggctcacatcattcagaagctgatcacaatttgacctactcgcgcactccgcagtccgcgcgctgggacgtacggcaacgccctgtccaactcgctcgagcgggccggcgcgcttggctcgggcggcgcctggggtaggggtggtgcgggcggcgagggcgccggcgttagcgaggtcttgtcactcatcggcggcctgaggggcgatattaaggggatgaagggtggccttctgagtcggtacgtcctactgcagggcgcgcaactggcatcaagcgctgacccgcctcgctggctcggcttcgcagaaaggcgttcccgatgcgtcgcggccgcccggcagccgagtcgactccttctggctcgacgccggcatcctcgcttgcaccaacaccctcgacgacgcctccgctggaatgagacggacagttgtcgcaagccgcttggcgccgatcgcatgtgccgcgacacgcactgcggtcggtgctgcgcaggagcatcgctcccggcagagtactcgtcctcgcctgaccgtgagacgcagcatcttcgtcgagaccctgctgcagtcgtcgcgatctgcgactgccttccttcaccccttcggtcgacgctgcagcgcctgtttcggagcctcgctagaactcgctcagacggcgcccgagcgtcctcccagatgtcgacatcgactgacggcgctcgtatcaatgcgatccacttatccttcctcaacctcctgtctgcgggcttgcgcaagggcgatgtgatggcaaaacacgctggcagctgccttcagtcagcaacgctcgactcagacgcccctcttcaagcagatgaccctcttgagttgcacaggccatgcacattctcacgaccggctgaggccgcggacgacgtcgcgtgcagtctggtacgagttgagcttgcgcggatcgcttgcagccgccggcttgcggccgctgacccactcgcgaccgccgaggtacttctcgccccggccgtaggcgtcgagcgggctcgtccggatgtggctcgaagtcgtccccggcgcaaagtcggtccgcgagacctcgatcgagaacgggtacgacgtctggaactcgaagtcgggcccgcgcgagaccgagttgtactcgagcggccggcgctgctcgctctcggtcgcgacaacctttggcgggtcggcgaggacggcccggtcgacgcggaagaagtactcgccgtcgccctcgacgcggccctcctcgcgccactggccagacgacgtcaggcctaggtcgaccggcttgaggccggcgccgccgagcgcgctggagggcgagccactggcgaccatgccgccgatcgagttgaggtcctgcgtccgatccttggtgccgggcagtgcgaccttgccgaggtggtagcccttgagcgggcgggcgctcgcaacctcgagcttggtcgggagcgcgtactggagaccagcggtcgggtgccgggccgagtagatgccgtcttcgtggacggcgtcggcaaagtgccggcggaggaactccttcgactccttgaccgggacgagcgactcggtcgtcgcaaggccgaggagcgtcgtgtcagtcgggaccgctccgttcatgttggtctggagcttggcgagcaggtgctggcggtacttgggctggagcgccttaaccgactcgagatagcgcgcaaactgggcttcggtcatccgctcgacgtctggcgcgtggtcgggcaggtgctcgtgcccgttcgggttgatgaagtcctcgatgaaaaacttgttggccggctcgagctgcttactcgcccgcgagccgccggtccgttcctcgacccactcggtgagcgacgagcccgtctccttaagctcggccgtaaaggcaacaaaggcctcgccggtcgggccgtcctcgcgaagcgcctcaacgagctcgccaacgctgacatcgcgcgcggccgcaatcgcgccgctgtccgggccgacgctcgtcgacttgggcagccggctctcagcccgctcgcggaggaagaggttaaacgcctggtcctcgagggtgccgacctcgtgcaggtcgcggatgacggcctcccagtcgctgagcgacaggcggctcttctgggcgtgcgagacgatcgtctcccagtcctcctcggtcggatcgttggcgagcgagtctgggtggaagaaggacgcccgggcttcggcctcgtgccggaggttgttgagctcgagcgcaaagtcggccgccgagccgtgcttatggatccagctcgcgagcgttgccgcctcgccgtcctcggcatggacaaaggcaacccagcgtgaccagagctcggcaaagagctgctctcccgccggcgtgggcaggtcagccgagcgaacgaaggcggcccgggcctgctgctcggcctcggcgtccgtcggctggttggcgagccgccaggcctcaacgcgctcctgctgctggcggtggaggtactcgcgcgaaacgacgatgcgctcgccctggtcggaccacgggtcggcgaccttgcccttgtcggtcgcccagttggcctggccgcgctcaggcttcatccgcaacggcgtcgtttgaccgccccacatccggagaaaccgagcgctcttgtcggccgacttccagacggggaggccgagcatgctgtcgacctcgggcagcgtcatgttctgcatcttgaccttccagccgggacgggcgcccgtgggcgtcgccagcagctggtgcttgacgccccagtcgcccgtcctgagctgagcctcggatgtcgtgtagacctggccgatcgaaggcatgaacgatgcaaagcgcgaccggcggaggaggctcttactggagaggcatatcggcgacgcaagggggaaagggtcagcccttgggaacagcggaggggctgcaagcaggcgagtcgacggttggagggacgcacaccgagctcgaagcgacagtgtccgccatcttctaagcgactctagtcttttgtgatccgccttgtggaaagaccgagctagagaagaggtgcttgccgaccacggcagacgagaaagaaagttaaagaggcggaggacgggtcgtgagggatgggggagacgcggaaggaggggagccctgtcgactgtccgctcgacaggcccgccgccgcgcgagaaagtcgagcagcgccgccggccgaccaagcggcatgagtcgccagggctgtcgtcttcaacagctgcacattcacgtcgacaaagcagatccttcctagctgcattgtctacgcgtgctgcaagatcatgccacactcactgccaatcgacctggacgtcccacaccccgcgaagcgcgttcgcgcaggcgacccgcccgccagcccggacccagcgcttggcctggccgagactgatgtcgcactccttgacctcgccctgggcaaggagcgccgcccgttggaggcccggcaggaagggcgtgtcggctgctaggcgcggggtgagccagcgggcgtcggcggcgggcggctcgccgcctagtctcgctgggaggaaaaggacgttggcgatggtcgtctctgtcagaaagagcgactcttccgggtcctcgttggcgtctgtaggacccgagcgcggctgctggacgtagagaaggaccgactggggttgacttcgggtgtcgtctgtcgagggcagcgttacgccgggacggaagaggctgtcagccctttcgctggacgaaagccagagaggagagagactgacggaggagaaccgtgtgagcattgtagattgctcggtccgacgttttgatcaacagcgacgctgatcgcgtctcgtcctggctcagcggccgggacgagaataccacacgcggcaagtcggccccaggtgcgggcggcgggaggttccgtgaagaggaatggaagggacctgcagggcgattagagccgtcagccacagctagagtaggtgaaacgttggccaaggagtggggcgcgcaccggacgggaagggaaagaactcgatgcggagggcctgagcggcgacgccgaccgagaccttcatctttcggatccaaggaagatgaagggtgtcagcctctgccctcaagttcaagcgataggagacggcctcaccctgaggtctccgctcaggacaggctccttgccgtcgctaccatggacggccgaagcgaccgcctccgagattcgccgctgccagctagccgcgtcgacgatatctgcccgcttgagcgcaagggtccggatgccttcggtgagcctggcggcatgtgcttcgaggagcggcacgcgaaaggacgatccgctctgcgacggctcggctgaatggccgaggaggacgcgggcggtcgtgaagacctcgaggtcggcggtcggcgtcgtccccggatcggcgaggactgccgtcgagcctctttgagtgccatctgtcgagatcgttggtgaggctgcggacatgatctgcttctggagtaagaagtggagtgggagaaagagagcagctgagcggaggtgagcgtcggagggggatcagctgccagtcggcggcggctcgaacgagggtgggcagtcggtaggtcgacgacgctgccgacccatcgctcatctccttcctcagggacaagtcagcaagcagcctcgtgccagtatcggccctgttgcccgggccggccgtttcgtcggtcgaagggagaacgacagggccggaagtgcacgtgagactagagctagaagtcacgctgagccgtggcgcgccactgctcactacattagttcggcagttcgaccacaatcgttggcaattacaagcacagccgcagcattgggaagctggcagtgggctggtgctcagctcgcgcggtcgatatcgaatcagatacccttttcgaagtccggcgccaggcgcttcgcgagccagggcaagaggacgacgacgacggtcactcgacagccacctccttctcttcctcacacgaacatcctcgctcacccggagtcaagagtcaaagagagcgttgcctgtacctttacggcaccccgctcccatcctcctcatcgagctcggccatcgtccgccgaccccgccggcttctcgtcgcatttgctcgccgacaggcccccgatctcgcttcgctcgcgtccattccctcggccgcaatcgccagtctcgctctcaaggtacgttgctgtccgatccgaagtgggcagtcaggtcgagtttacagatcggctgacatcgacgacaagtcgcaggccaacgactcccttcctccctgcttctcctcgcgcgcttctggctcgcctgccgaccgtcgcgctcgccgcccgaagcgtccgaaaggcccggcctgcgcgcgctctccgcccgtcccctgacctctcgtgagcgctctccgtccctccaaccggtctgccctagctcggccaagcctctgacagcttgctcttgctcgcaggtcccgtcgcggccgctctcatacctcgtccgcccgcggcgagctcgccgatcgcagccgcccgcgccgtccaccatggcgaccaacacgcgcctgccatccttctcgtccttctcgaccctcggcggccacccttcagcaccgccgccgccggcgctcgcaagcccccagtcggtgtcgagcccgtcctatccgtcgtacctgaccgactcgtactcgttctcgccatcgccgccgggcccacatcagccgctgccgaacgtcgccgacctcgtgccgctcccggcgatgctgcagcggtcgtcggctgcctcgggctcgaccgatcctggcacactcctcggcggcggtcaagggccagcctctcaggcctttgtcatgccgggcgtcatgcccgagctcgagggcacctacgagttccgcaacttcgtgatggacgagcccaggacgtctgcgaacggcgctcccccggtcctcgccggtcaccagcacggtgaccatctcgcccagtcgcacgcggccaacggctccggttacccgttccctggcggcccgcctctgccgaccgctttccaccccggccagcaacatcaggccacgttgcacccgcagcgacatcacccgcatcagccgtcgcagcacggtcgagtatcgacaagcccaggctcaccggccgagtcggcctcgtcatttgcctcgtcatcatcctcggcctacacgcgacattcagccatcggcaacgccggggccggcagcagctcgcactcacgcgtcccgccggacgtccgactcgcgcagggcgcacagggcttgaatgaaggcgcaccgtggggcacgtatggcagcttgtccagccgggccttctccatcgacgaggacgaggacgaagaagagattgacgacgacgacgaagaggacgactttatggaaggcggcgacggcgcgcaagccgagacccagccggccgtcgccccgccgccgcaccagccgccgctcccgatcgacatcgagaacgacgagccgctctacgtcaacgccaagcagtacgagcgcattctcaagcgccgggctcagcgactgcgtcttgaggaactcggcaaggttgccaaggcccgcaaggtacgtctcagcgcgcgctcgtcctggacaagtgcctcgagttcaccctcgtcctcctctgttcctctatgcagccctacctgcacgagtcgcgacataagcacgccctccgtcggccacgcggcaagggcggacgtttcctggtgcgcctctgcgccttctttggcttgacaactcgaggagactgaccttccgtcccgcttgcttgcagacggcagaggagttggctgccctgcctccgcgcgaaccgacgtcaccctcgacagaaggcagcacgcccggcctgaccccgggcccggcacctcttgcggcaccgccagcagcgccagtcgcacctctgccagcggccaacagcaagaagggcggcaaggcggcggcgtccgcagcgggcggtgcgaagggcaagggtcggcaaggcgggtcgctcaagaaggcgccagacaaggcttaaaagcgtgcttcgctcacgcaagccgacggtgtccgaaacctcgtgcaatccccatgccattctctcatccgatgtgactcctggcgcagcgctcggccaggcgcgacagccctgttcgcatttcgctcggtcgcagaaggaggatcgagtacaaggtgcattgtacaaacaggcaagcgaacggggacttacgactggcgatcagagcggaggtacgctgcgtgcaagacgaaaggcgaaaaggtcagcaagatgcttctgagtacggggggcggtcgagcgcgaggtggaagacaggtgttggagggagcgtcataaagtaattagaatacacggttatcggcatggcattgagcctctcgatttagcatggaagtgtggtgtagttccttcgctgatggtggaaggggttgcagaggtaggaagcagagaaggaagactgacctgaggggtcggacgtggcgaggtcttgaggacacagctcggtcgacagcgtccagttgccgccacgtcattgcccaatcgacagaatcctcgtagagagcccctgcggcagcggctggactcggtgcgggctgtttggaaaggagaaaggcgatcaatggttcgggagggggggttgtcgttgacatatcgaggctatggcggagcgtgcttgcttcaatttcgctgctcgagccagcattcggaggttgcacgctgcacgtgccttagcgtgacaccgccgggctgactgtggctgatgcctccctcgcagctcggcaacctgcagacgcctttgctccggaagcaagacgacgctcctcttgcgggcggacgaagcgctcgaagcggccgacagattgtcatgtcattgagcagcagccggtcggcggcgcgccgacggaatcagaacctcctgacgagaatcgaacgcccgctcctccgagaaggacgcagcgagcgagggcagggcagggggtagtggctgtggctgcccccccccatttggacggtcttcttggtggctcgcgcgccaaaagtaatagttgcgtaggctttgctgagctgtgaagtgcagtgaagaaacccaacgctcggggtcgggaggaggggtggacaaggtcgggcccagccagcagtttggaatgaccagggccaaacatctcgagggacgattgtgaggcgatctcgacgaggcctctgatgagcgatgactgctgccgcccttttgccccgaagaggatccgctccttttccgcttgtcgacggcgcccctcccttcccttgcccttccagcaggtacgagagagcgcggctcgccgtcccggcttgttgagggcgttctaccctggccaagccggtgcgaacaaaagggtttttgcgctctggcgaaggcacgcgaatcttaccctctttggagggcgagccgtgcagatccgaactgctctagcacgagacaggcgggcgtgaaccatgggcttgccccgccgccggcgcttgctcgcgctccgtcagccccgcccctccttcctcgctggcgaagagcctgtggctcggagcaaactatatatgctgtggaagagcgccgccgctcactcatggtcgtgcagaagagtcagcggggcaagcgccctgctgctgctgctggctgcggctgacgcctcttttggtcgatcgcccttttggccagccacagacggacgctctcgaccccgccgcgcgccgggccttgttgagagagcaagttcattaaaagcgctgggcgggcgggtttcgtctctgagcgagcagctgcaagcagcgaagcgcgcgagcagcagtgcaagcagcaaagtccgggccctccatgaaggatgcagcgagcgagcagaacgcagcaggtcagcagctgatccatgggccgcagagagcgagacggagcttcctcgtcgcgcgcgcgcgctttggcccgtttccgtcgcctcgccacgcgacgatggccttgcctcgaaccaaagcagccccgtccccccccgacgaacacgacgcaagaaggaacgagtctctttcacgatcccccgccgggcagggttcgtccttccccacccatcccattgtctcgttgttcgcccgccaacgccatcctcacccatcctccctcgacagccagccagcccagcaggcgcccgccgtcagccctctcgcaagcaagaccgtccgcagccgcccacgccgcccgtctgcgtccggcccgtcgggtttctccctctccttcacacgcaagccgacccaacctccccttccagcgcgcatccggacgagcgttcgcacaggaagcggatggatgatgtcgcccccgacagcgagggctttgccggcccgtcgtcatcacgccggtcgtcggccggccagcttgacgacgacgatgcgtgggacggatcggcgcctctggagctgaggtccaaaggtcgatctcagaaggtcgctctcttcacctccagccccccgcgcgacgcatccactccgtctcgggcaaagctctgcccgccacctccagtgttagcaccgagctgacggcctttctgcgtcttccaggtcttgggcgcctgcgcgccgtgcaagcgagcgcacctcgcgtgcgagccctctcgaccgtgccggcgctgcatctccatgtcgcgcgaggaccagtgcatcgacctgccagtaagtgtcctgccgctgctcctgctgggccttctctccaacttttgcctgggctgacccaactttcatccatctgccttgcagcaaaagaagcgcggccggccaaagctgtcggcctcgtcgggccaaccgcacaaggttccgcgcacggcctccctcgtcatcgaccctttgcccccacgtacgaccgacagctatgggcctcagacggcgccggcttatccgtcgtcgtcgtcgcatccgacgcacgatggcccgcctttcccgttgtcgcaacagcatccgtcctccggcgcgctgtctgcgtctgcatccgctcaggggctattcgcagccaactactcgctcgcaccgaccgcggtcgcacctccgccgcagcgacctcggccgctgtcaatgatcctgctcacgacgaccgacttcttcctgctgcgcgcatccgagtcgtcggtcgccgtcctcggcaaactttcggcgtcgctcgagcggtcgtggatgagcgagctcttgccgtcagacgacctgctcgcgctgcatccgctctgccagtggcttgtctcgccgccgggcgtccatctgtcgaccgatcaggaggctgagctcgcgatcgacacggcctcttggtcaaaactcacccaggcggccgaggggacgccttaccccgagaaggagatccgcttgcggcggagtgacggcagcctcgtcggtgtcaacctccggatgcacctcggttcaggcgccggtctcgacttcaagtccgtcttgctgtgcagctgctgctttgatcttaacgaggtgctgatccggctcatccttcctctcaccagacatcccaagacgttctcaaaggcctacatcgtcgtcacctgcatcgtctcggagtccagtccgccttcgacggcgccgtattcgaccgctacgtcagcactcagtcctcgattgaaaagtgccgccgaggccgctcagtccagcagccggccgatgtctgggcaggctgcgtttgcacaccacaacgaccctcacggcccgtcgcccgtcgcgctcgctgcccggcagtacctccggccgatcccttctttgccgtcgatctcaactctcacgaatgaggtcgacctcgcacagcgcgcccgcgccacgctcagcgccggtggcgggccggcaccaacgtttctcaatccgttcacatcggcagccgcagttgcgccgatgcagctgccgccggcgagctcttctcagacgtttcgtttccagcaaccgcgaccgccgacgagcgacggcaacagccggcggccgcatggcatcgtcctcccgccgccgacgatgatcggctttggcggcaactctgcgtctcgcctcgcctcgcccggcatctacggtcagcaccagcggccaatgtcgaccgactcggcgcactatgccggtggaggtggcttgaccaaggacggcctgccggcctttgcgtccttcgccgcacgaggctcgattgcctcgatcgagagcatgttctcaaacgcgccgtcggacgccctctggagcccgagcgtgatggacgagccgccgcggagacgagggagcgccctccgcctcggcacgggcgacagcagcaacagcacgatggacggcatcatctcgcagccgctcgacgcgcctgcctttccctttcctgagcgagacatgctccatctccgaccaggctcgcgccaatagacggcgtgcaggccctcgctcgccgccgcattccggccacccttcccatcccttttccatctcatctagatcaccgccgccccatcttcgcccttcagcccgttcgcatttctgcctctcgctcggcctgctgcacgcccgaaggatctgcccgcttctgcttcgcaaacctcacatgtatacgaccgcccgacacacacgctcgcccacttgtaaccatattgcttcgcttcatctgaccgtcgcgccgcgcattgagcagaggccattcaaatcgtgcgacgagacccagagagaaggaaaggcaagagtcgagggagatcagacagggaaaggacagaaggcgcttgtggggatggtagggtcagtagggcgcgcgcggccggacgagctcccttcggcgcgccgccgccctctgcgacgaccagcatgaccagcacgaccagcacgacccgctcgcccgcgcgccaaaaacgggggcagctgcaaactcttcacctgggtatacgactgcgagctctcagaccttttgcttcttctcctcggactcctggaaaatgcgaagagggcaatggtcagccgaggcgatcatctgtgagcgcagctgacgaaggaaggacgcactccgccgacgggcagaccgaaccgctccgcgcgcttccgtttgcgctcctcctcggccgggtcgacgaccttgggcgccggcgctggcttcggcgtcgtcgtgcccgacttgggcttgtccgggacggccgccgccttgcgctcttccgggcccttcttggcggcgggtgcgaacattgacggcggcttcgcgcccgtccgcggcttgggcggagtcggctgggccttctcgacatagggctgccggagagaggtgcccaaggcaaaagttaaccttcgaaaggttccggctcaagcagctcgcccgagagcgaaacaaggagtcaacgtacgatgccaaaccgggccgctcgccgcttctggcgctcaatctcatcggcgtcgggcttggcctttgcgtcggcagcctcggactcgacggccttcgtgccggcgtcatcgaccgacgcggcggtgtcggcggtcgcgggcgcgtcagtcacggcagcgtgagaggtagcggccgtcgtcggcggctcggcggcggccggctgcaggagaggacagatccaagagacggtgtcagtcagacgacgacaaggtcgaagctgctcgacggccagacgacacgcacgtcctcggtcgacgttggagcggcggcgacgggctcggctgccgccggctcgtcgtcgtcgtagttgacctcggtcgactcctcggccggagcagccgtcgagctcgaaggctagagcgggagcaggtagcaggcagctcaaacgcgtcagctcggccaggtcctgctcggcgcgtgagcgcgagctagagagaggctccggtcgacttacgtcgctctcgagcaggcgcgcgatgagctcgtccttgcggccagtcgtcggcagcgagcgggccgtgcaaagctccttgaggtcggcgaccttgagggccttgagttcagactcggagtggttggccatgatgaggtaagggtgacgacgggggaatagagggaggaggtggtcgagactcgaggtcaagcaaggaagggaggccatctcggtgagcgggaggaaggggatgcgggacggtagggccgactcgtccggacaggcttcgagtagccgagcccctttgatcgcgcggagcgcgccagctcgaccctcgcccttgacggccctctccgcacgagcgtccctgcaggtcagcccaccccctttgcggcaactcgtacgtctcatcaagcctggctgcgatctgcagccaatccggcgacgcgcaggttgatcccatcctgttgcgaacgtctgcccggcagcacccgcacccctcgagctcgcaccggccgcctatctcctcatcctccataactcgcttatctgcgacacgccagctgccctgcttctatgctcaccctattcaaagcctcagctggacttctggcacggcagagcgccacgcttaccgcctgctcgtcacgggcggcagcgtcaaggtcaaggctcgaagcctgcgtgcgtcccccttcccttcgacctcgctttgctgccgtcgctgacacgctgtcgcctgtccttcaccagcggcccgttacgaccaagctaggactccctcagggctcagtaatgccatcgacccgcctcgtctcgctcggaccggccggcgccgttctcgtccccagcatgggtgcgcagcggcctctgacgaccgcgtcgaagccggcctcctccgcgacgttccccgcctcgttcgtcccgttcagggcgacgccacccgaactcatccccgagtctgtcggtccagcaattcggcctcgcgacctgccgcggctcgcatgccagcgggcgtcgccactcatctgcccgaaccagcagctaatcgaggagctcgccgtcatctggcactttcggcggatccgaggcgagccaggcccggtactggaccggcacgagctcgcctttgagaaggctatctcgtcgatcaaggcgctcccgacccggctggtcgacgcagcagaagtggtcgggctgcccttcgtcgggcccaagattggcgcgttcgtcggcgagtggatcgagaccggcaagatcgagcaggcccgtgagtcggctttctcctttccttcgccttgcgttggctgaaactccgctctttatcgacgcaacagaggagctgcgcactgatgaccgcctgcgcgcatgcatgctcttccagacgcttcactctatcggcccgctccgggcgcgtgacttatacgaccggcacaactgccgctcgctcgtagacgtctacgccattgatcccgagacgcagctcgaagtcgactactgggaggagctcaacacgccgattcctcgggccgaggtgagcgagattgccgagacaattgcgcgcgagctcgagcaggtcagccccgggtgcgagctcacgatctgcggaggcttccggcggggtaagctctcgttgggcgacgtcgacctcgtcttctcgcaccggaccaacccggatgccgtcacgctcgtccagctcaaccggctgctcgaccgcatgatcgaccgcggcctcgtcacggccgagctttccggcggcacgcatgaggcaggctcgcgcctctggcagaagtacctcgtcttccgcctgccgcacgaggagggggcacccaagcgccttcgcaggcgcgtcgacgtcgtttttgcgcgtgagactctcctcatcgccgcgacccgcacctttcaaacgggcagctgacaagccaagcctcatgtcttccttctctcaacagccttcgagaactacgcgacggctgtcctcggctggacgggctcgaccgccttcgagcgctcgctccgggaccgcgccaagcagctcaagatgtctttcgattcatcgaacctgacgagcctggcgacgggcgcccgcttccgggatgtcgacccggccggcggtgaggaggctctgttcgagaagctcgggctcgactggatcgagccgacgctgcgcaacgccgacgtttgaggggccgatcgcgaaaaaccctagccgagaagggcgagcgctgaattgcatgccgtcttctgatctgatcaagatggtggggcgaacgtgccgtcctccacggactgcacggtatctgtcggcgagataagatgctcgcggatccagcggccgttcggcaggtcattcgcctcgactgtagaggggttggagagtcagcccggcggcaactgatccatgcattagctcacgcacctcgcttgagtgtcgcttccattgtcgactcgatccctgaggcaaagttgcgcgccgcaatacgtccgcgagcgacctcctcgtcgacgtcgacccagatgcggaggtcgagtgcgcaggctgcttgcgcccaagcatgctcggttggatcatctacgaacgcgtacaagccctcaatgacgacaattcgatacgacggcgtgatcggctctggggctggctgggggtccttgagctcgtgcgaaaaggttgggaaggcgatcgtcgccggcggcggcgagaggcgaagcgaacggacgaaggcggcatacgagggcgcgtcaaaggtgaaggctgcgcctcggcgcgcgcgagcgaggacagggtccgggaagccctcgagcgcttggcgggtgtgatgccagccgtcgagaccgacgcagatggcagggccagccgctgacgaggcgtcaagcagggcgttcaggcgatccgtcagcgggtaggcgagcgtcgacttgccggatccagggatgctaccgtccgcatgcaaacgatcgcaggtcagtgaggcgtacgtttggggtcagctggtgcagtgcaagaggggaccgacccggcgatgccgacgaggagccgggcgtcgggcggcgtgctgcgtagcccgtcgtcggggggaaagcagcaggtcagcccagggcggccaaaggtcgcagcctgcaaacgcaccttcggtagcgcgccataatcttttcggctaggtcgcggatggtgctgtccatgctgcttgcttgctgctagctggcgggttgtgatagtcgaggtcaagccgcctgtctgcccttcctctccgagcgggccgcggcgtttccgctttagtgctcgagcccgggggcgtcatcgcgacgacgccgtcgcctctctcgaccaccagctcctctcaagcaagatttgctgtcccccgagccggccgaccgcaacctcgtcccaaggctcccggaacagatgggctgccgagcctgcagctcctagtcctcgtctcttcgtcgcccgcctcccccgcaaccgaccctcgatctccccgcggcccgacccacagctccgggccgcgcgagaggagcgagagggatctacggccgtcacatccgccttcgacccatcactcggcctcgtctccgtccgtgacctaagggaggcatgtcgtccggatcgaggccggccaacagggtcgaggccaaggtgcgtctgctgccgggcggatcgtgctgcacgagggaagggaactcccctgccagatgcgccggctcggagggctgacgtcgagactccctgcgcctgctccctttgcagtacaacgtaacgaccgagtgtgagcagccagtcgagctgtgccgctgagaggtccgcctaccgctgctgactgctaccctgcctcttgctgcatgcgccagacccggacctcggcctgcactcggccgccattaccggcaacgtcggttggtcctgaccttgccagaggacgcctttatcctgcctcggagctgatcctgcccctcgcgacatctgcaggacttgcgcactatgcactgacgcacggtcagcccgagaacgcgctcctgcatgggttactaccgctgcacgcggcctcgtctggcgggagcgagcagatcgtcgccatgctcatcgagcgcggcgctgatgtcaacgcgccaaggtgcatcataatgcgcccgttctgtcagcgctgtggctgacctcgccgctcgctcgcccgacgctcgcagactgccccggcgctacagcaacgacggtcgcaagatgccgacagtcggcgtctctggtgcatcctgtacagatcatgactcgaaacaaggctgcctggctgacctgccattgcctcgctcaggatctggaccgctgcatttcgccgcagccaacggtcacttgggcgtgactcggatgctcctcgctcggggagcgattccagacaagcgcgacaagcacggtctgacgcccgaggatctcgcgctcagtaacaaccacctcgacattgttgcgacattgagggcctttcagacgctccggcttagcttgcaggaacgctacgccggcgacgactcggccatctcggacgacgacaccggcgaggagagcgacgcaagaggcgtccctccgctacggtcgaccagcatctcgagcacgcccggggcgggcaacaaggcgagcgcaatgatgcgcggtctcggcagctttgccaatcgaggccgtaggtcatcgtcttcggccgcccaacggccgtcgtctgtcgcatccctcgcgctcggccgctcgagctcgctcagccgcaaaccgaccaaaggccgcaactctggcgatttgtcatccctccggacttcctccaagctctcgctctcttcagagcggtccgactcggctctctcgctctcttcgccgctcgacggcgccgcctcctcgtccggctctggctcacgccggcttgcgaccgatgcgccgccgacgccattgccggtgcatctcacgcagagccgtcatcgccggccctccctcccttcgatcatcgaaaaggcggctcaccagatggctcatcctcgctcgcgccacggctcgaatcacgacacgtcgcttggcagcgccagccggacccacagctttgcgagctcatccgacgcgcagtcgatcgacgcccggtccatctcgtcctcgacgcgcttcacgagcaaccggtcgctgctcaagatcttttcccgtcaccgcaacggcaacgacagcggcggtgcgagcgcggccgacctctcgcccgagtcggcttcaccctcgccaccacggagcacgtcggccctccagctcgacgaagaggacatcggccggacgatcgaagagtttcgccgcctgtcgttcgatttgggctcgtcggcggcctcgatgcggtcgtctctcgacggctcgaccggcggcggtcgcgcttgccacccaccttcggcgccggcatcgcggacagagttcttttcgccttcgccctcgattcctcgtctcgacccccggaccggcgcgatgcagcggtcgatgtcgcagcactctgagcccggcccggaaggcgacaagtacagcggccgaccgggtggcagcctttggtcgatcggcgcccgggggcccggtggcgaccgttcgccgctagtgcacgactggtcgcctgccgcaggcagtggcgcagccgacgatgcacgccgtcgtcgcgcgagtgaaggccgggacgacgcctgggcctcaggcggctacaagggcaaggcgcgtgcgccagcgagggcaacgtcgtacgacgaggacggccgccatctgtcgtcgacctcgatcgacaacggcggtcgcggctcggtgtcgcccaaatcgcccggcggctcgagtccacggcaggagggcggccaagggccttggctgtcgaacggcagcagcccgtactacaccgagacggacgagccctctagcggggcgccaactcatcggccggtcagccagcaaagttccaatttatcctcactccggcgcgtcgcctcggccaacctacgccggactgccgaagagccctatagcccggcgtcgtcgtccggcgacctcggctaccaggcctcagcccagttgtcgcaggtctacccgtcgatggcggatgagcgcgagagcacggccggctggaaccttcgagggatcgacccgcgccgagggccaggcttcgcaggcggcctctcggtcggccttggtcggccgggcggaggacgcgcacgaggcgcgagcatcaactcgaccctgtcctcagccttctcggtctcacctcagctcggtgcgcccctcagcgagggcgaagaggactctgacagctccgcgccagccccgccaccggccatctttgtctctgcgacgtcgcccccggctcaaggtcgcgctcgagcgtttagcggctcgtcactcggatctaacgcatcgcgcgggccgtcgaccggcggcagtggcggtagtgggagcagctacacggcgccgtcgttcctctcgtctggcgcgccgagcacctcgtccgggccgactgtcccctccgtgccagaagactacagcgcaccgttcggccagccgccctcgttcggtcgacctgcggctctgcaacctgagtctgacgcccatccgggccttcagcaacgtgtctcgtcctacgccgaggcgcacgatctcgtccggcaggccgagaaggacctcctcgacctccctaccaagtggtcctcttttggcgcctcgggatcgactctgtcgctcgcggcgcagctcgccacctacggcgagcgtctggccatcgagcgcgagtttgcgcgcgcgtcggcggtcgacctcaacgccaatggcccggtgtcggagacgccagaagccgagccttcgaacgcggccgtcgccgctgttcaggagcaggagtggaaggcagcatcctcgccccggcgcaagagcgccggaggctcgataaccacgcaaccagcgaacgacagcccgcccccgccccgggcgaaggaccgaccacgggccgactcgatcgacacagctacggcgccagtcaagccacgcgggcttcggatgggtaatctgatgggcttccagcggcactcgcaggagcgtgcatccgtccgatgtacgtctgccaaggcctcttgagtcgcttcagagcacaatgctgactcgctccccctttctgcatgctcgctcagccacgtccggctccagcccgttcgcgccgacacccccaccgctcaatcttggcccggtccctcatgcacctcctgccggctctcatcacctgatggagctgccagaggttgcccgggtctaccagaaccgggccgatgccctccgcaagcgcggccagaaggtcgcctcagcgctcggcagcccgctcacctcacccgtctcgccttcggtcagacgagggaccaatccgccccgatcggtcgtcgaggccgaggcgggtaagatgtgggtcatctcaggccagccgtcaactgtcatccggacgccaccgacgcccgagacctcgtcgttcagtgcgatcgcaccacggctgccgccgctctttggcatgactgacgaagtcagctcgctccgctcgccagcgaagacgagtcgaaagcactcgctcgacgctcacctgtcggccgacgggccctcaaacggctcagccagagggccgtcgcggcttgtgcctccgagcaacctcgtcgcaagccctctgcgctcgtcgtcgccaatctcggccgcaagggcatccccttcaggcgtcgcatcaactaggccgtcccgccggtcgagccgcgactcgcctgacacggtgtcgcctcggcggtcgcgcgaccactcgccggcaacctccatcagtggcggctcaacctctcgcttcgaggtcgttcgacggtcctcaggccccgacacggcgccgccgtcgtcaaccggcaccctaaaggacggccactcgcaggcgcacggcctcggcctcggaccgaacggcacgccagcggccctcgaagagtacggcccgaagcgcaagttgtcggcctcgagctggggctcgcgcttcctgcacggcatcggccgcaagggctgaatgacccttacgaacaggcaggccgcaggcagctcgcccgccccttctcagcccccacacgcccagctcggatctcaaaacccgcctccctcttgccctcgctcgctcatcttccgtctgagggcttctcctctcgaccactcagttgtaccggccatccatgccgatcgtacttgtccacgcaatcttgcacgaccacttgctattcacgacccgcagccagcgcttgaacctcagccagaggcgctcagcagctcgagcgcgccacctcctcgacgggagcagactggtgggtgccaggcgtgcggatcgcttccttgttggccgtggacctcttcatgcggcgacgatgagcgagcagagcgagcagagcagcccttgttcgccttctcttttgctgcgcagcgcagcggagggccgaggcccgcagccggggagcccgcagagcaggagcgtgcgacggcgcagagaggaaggtccgggcgagcgagctgtcagcaaggccctcatgttcccctcccgacggccctggcacctccaacccacccttcggtagacgacacacgcacgctccgatcgcacgctctccgccggcccaagaagcgacccggttgagaaaaagagagagcctcgcgactcccccccgcgcccgcgcccgaggtccatctcctccagttcggtcgcgtcgaagctcgccctttcacagctcccctccccggggcgaggacctcctcctcttcgttccgtccgacccgccgctgacgaggctttagctagagactagctcggcagcgcatcgctctctcagcttccgcggccgcccgcctcctacgacagagctccagccacggccatccgaaggacgtcgacgctcttcggctccccgctcgtcgcgcgacggccatggaggtcagcccgacctcgacctcctttgatccggcacacgaccgaccgccgccgctgccgtcgtcgtcgtcagcctcgcacgatcatcaccggcactcgcccggcagccacgcccacgcctcgcacatgcacccgcccccgcctgccgacggcttccggccagcgaccccgagcacgcccggcgggcggagcgagggctcatcctcggcaggggcaggggctgcgctcgacgagccgcttaccgtcgaggccgggcccaacgccgtctgcgccggctgcaagcgagccatcgagcaagacggcactgccggcgtcgtcatctcgtttgggttcgtccctctcgctcgacgaatcgcctcaagatcggcttccctccaggccgcccgcgtctgctgaccatctctcgacgacctctgctgccttctagcaactcgttcttccacatcgactgcttccgctgctcaaaagttcgtagctttcgtcgctcttttcgatgtcgggcgacgactgatgagccgcctccctctggtgacagtgcaaggacaaggtgacggccgacgtaaacctcctgcttctggccgacggcaaccccgtctgctcgaattgcagctatcaggttggtccagttgcaaacgtcttccgtgcccaactcacgtactgatcgcttttcacctccctcagtgctatgtctgcaagcagcccatcatggacgaggcaatcatgacgggtcagtctgagcctcgagcgcggcgtgacgcatacgtctgtcactgacgcgcttgcctcactgcccctgctaggcgatgagtcctaccactcagcgtgctttacttgcaaacagtgccggtgtcggatctcagagctcgtctttgcaaaaacgagccagggtatctactgcatggtgcgggcgcctgttgcactcgctctctgcggacctcgctctaacctcgtttcactttacagaactgccacaacgagcgcgtcgccaagaatcgtcggcatcaggagaacaagcggaaactggcgcgcaaggagaaggagaaggagcgcctgaaggaggtcggtctcagtcacggtcgccgaagcatcgaccgagcccactgactcaacctcaacccaccttccatcccagcaaatcgcccaccagcagctccagtctgacctgagcctgcactcggacctctcgtcgagctcgctctcttcgggcttggcacccaacgagagctcctcgcgcgcttcatcgccgcttcgcacaccccaagacattgactctcgaggagaatactttggctcaccgatcaccccggcggggcgcgccagcccgatctcttcacaagggaccgaacaaggccggccggcgtcgccagcgtcctcaccgacgttccagatcgactcgccggacaggccgcgaagcggcatgacgacctcagcttccttgctcttgccggtggcgacgcctgtgcacccaggtctccctcggcgaaagagtgccgaggagcagggcgaccgggagccgagtgggctcggagccggtctcagcgtgccagccaagacgacgagccgggccgaacgaaggcggagcatcaacccgatgggctatccggttgatgtcgaggccgcggtcaatggctcgcgttcgcccgaccgaccgacgttcgacaaccaagcgccttcccagccagatgtccgggtgggggctttgccgccttcgccgctgcgaagctccttcacgactgagcaaaaggcggctggcgcccgagatggccggtcgtcaccgtcgccggcctttgaccggcctggtgccatgcggaggacgtcgtctcgagacgacgacagcctccattcgtccacctcgacggagcgaggcacgctcggatcatcacccttcatcagctcggacgacgggcggcaggcgccggcgccgtcggtctactttgatgcgcaggacggcggcgacggtcggcctggccttccgcggagcccgagcaccagtgcgccagccatctcaatccggccctcgtcccagtcgttgtttgccggaggcgctacgtcgtcaccgaagcggtcgtcctcgctcacgtcgacggccgcgccgtttcccgagtcaccctcgcgcgactcgttctcatccgagcgtgacacgacaccgaccattgccgtctcgtcgtcgccgccgccacggcagcgctcgatcagcaacatcggcactcatgccccgcggctcgacgcccaccgaccggtctcctttctcctgtcggacgaccccgagttctccaagctcttcgacgacgccgcgccgcgaggcgccttcatcgacctggacggcggactcgacccccttggccagccgctagacgtcggccaggggcaagcgctgcctgttcaacgtctccgtgaaggctctgaagactcggcctcgccggaagtgccgccctcgccagacttctcggacgaccagccgtcgccgcgccaaggctcggccggcctccgcgttcggcgtgactcggagaactctgtcttccccggccagagcgaggtcaacgagctcgtccgcctactggccggcctgtcagctagtgctagggaggacgggcacgagacgctttcgatgaaggtcgaccagctcgacgagatcctgagcgcggtcgttcagggccaggatcggtactcgacgctcaaggagaagtacgacggtgtcaaggtgcgtcgtctacgtttcgtcgccctcgacgcctccaccgacactgacagcgcccttttcgcagcgcacgagcgcccgctacgtccaaggcctgactgtcgcctccgaggactaccagaaggaggtccaggcgcgcgaggaggtcgaggccgaggtcaagcggctgcgtgcccagatgtacggccaaaatgcgaggttgtcaatgatcgacgccgacctcaagcggcagaatacggccgctcggcggtcgcgcgagctcgcgcagaacattcacgggctcgagaccgacatctccaagctccgggcagagcgcgacatcaccatcgccgaggtcgaggagctcgccagctcttcaaagtacgtcgttcgtgctgctgctgctgctgcgtttctctcgacgctgacgagacccctccgacttgaccactcgtcagagcctcgctcgtcgccgaggccacgtccggcctccagccttcgctctcgcgctcgctcagtaggcggctcgacaacctcaaggagcagtaccgcaaggacctcgaaccgctgacggccgaccaagagcggctcacgcgcgaggtcagcgaccttcgcgagacgcgcgaggtcatgatgtccgagtcggcaacccttcacgcccgcaacgaggagctcgccgacctgcaggcctcgctgcaacgccaggttgaggcggctcaggagacgctccaccgcgctcagcggcacggccagctcgccaacaccgtctcctttggcgccggccggcatcaccacgtcgtcaactcgccctcgatctcgtcgctggcgcctggctcgtcaaatgggcacgaggaggagatcgccaagtttgttcgtgtcgtcaagcccgagacgcttgatccgccagtcgccgccaaaaagttcaagtggtacggcggcaaggcctccaaggggccggagcatccgcactcgcagtctaacgcgtcggcaagcatggtcgctctgccgcggagcagcccgacgccgccgtcggcacccatctttcgcacgcgcggctcgcaggacgccaacgtcagggagcactcttttgcgagccacagcatcccgaccctccgcttcgtccgctgcgaccattgcggcgacaagatgtggggcgccgtgaccgagctccgctgctctcgtgagtgccgttccggccagacgctcggcgtcgagtccgcgctgacctgacatcctcctcttgcgaatgcttgcgcgcagagtgcggcttcaactgccactcgaagtgcgtccagagtatcaagtcggcctgtcatcactctggcccggctttggctcctctcgagggctcgatatccgagagcggtcctccgcgtgagtgctaccaactgagacggtcgtcggagcgatatggcctgaccaaccccctttctcgttcagcgccatccatgtttggccgcagccttgccgagcaagccgaggccgatggccaggaggtccccgtcattgtctcaaagtgcatcctcgccgtcgaagacaatggcatggagtacgagggtgcgtcattccgtcctgggccttgccggtgccgttttgtcactgaccgagtcgtcgtattctgccaggcatctaccgaaagtcgggcggcagctcgcagtcgaagcacatcacgcacctgtttgagcgtggcgactacaaggcctttgacctcgccgaccaagacacgtgaagccttcctcagctgcagccttcagacccttgctgactccatcgcttccgcccgtcgtcagcttcaacgacatcagcagcatcacctcggtcctcaaaaactacttccgcgccctgccagacccgctcctgacacacgagcttcacgaggcctttatctcggcggctcgtgagtcctgcatcactgcgcccgcgagccgagcgttggctgatccgttcgtcgcttcgaatccagtccaacgcgatgcgactggcaagcgcgatgcgctgtgtagtctcttgcgcaagctgccgccggcacacttccagacgctcaagtacctgatgctgcacctcaaccggtgcgtcgcctgtcggggaggagtggccggtgcctcttttcactgacgttgcgctccatatcgtcctcctcccagggtcatggctctccagtcgatcaacctgatgacggctcgcaacattggcgtcgtcttcggacgtgagtcgcaagcacgccgtctacccgaagaccgatgctgacaacgactcggccctgcgcacagccaccctgatgcgctcgcgcgatcagagccgcgagttcggcgacatgggcggcaaggcccagacgatcgactggctcgtcgagcatgccgccgacgcctttgccgacccggcctgaacggcgacgctttcatcagtctcggacctttgcatttcttctcgacgacctcacgtccccctccctttccgccccatcacgaacctgctcgcacactgctatcccgattcgccgaccttttcgcttgctcgcgcctccgctgtcgtttggcgcctgagtatcgcgcccgcctgtcgatggtcggccaccttggcggctggtgcagatgctgtaaactcggttctgaccttgggcgcgttttgctgtcgtctattctgcaggcgcggcggccggcggcttgctgcaactgagacccgcgagagacgaactcggccggccatgacaggtcgcccgcgccgacgacgcccgggctgcgacaaaagaccgaccctaagctcgacaaaaccccagttggccccagcttccaggcgggggcggagcgacatatcgctttgcctcgaggcttctgcggaaagcgatactagtcaagacgcaaaccggcctgtgttgatcccatgtcctgctacagcaccaaggagactgtaccttgttcattctcttcctcaatcacactagctgattttgatagctctgaaacgcgtaagaggccagctgctggtcgtcaaagccgaggctcgggagcgtcagagatcagttcgagccggcgcgcgcgcggtcaggccaatctcgaacagtgacgatgcgagagaccctcgagcgctgatagcggctatgcgacgtagaattcacttgagcaaaagtgcagaacatgatgcgatagagatgagtcggccctagtcaatgtgcgaaaatggcgccttgagaatgagataggaccgactgagagctgatggcgtgtaaggcatcgaagctcgagaggctcgccgcggaaacggctctgcttgctgcgcgcctttctccctgcgggggcgggccgtgcacgacgacaaaagaccgactactccagtggggaccgcccgaccgccggctgtggctgagggctccgcgaaatctgcggcaatgggccccttcccccgcggagaaggagccgggctttcctgctgttggctgtcggacacctgtcgttccctgcaacccgacaccccgggtgccgacacccagctgacccgctggaccgacttttgcctcgcccgctgccatataaggcgacgggcgttagggctgagctagagctttcttcttcccttcaccctccgtctgccgctccccttcccctcctccacagcaccaccgcctaccatgtcggccgacctcaagaacaaggtcatcgaggacgaccaggtgtcctttgacgaggacccgaagctcgctgcccagatcgaggctgccaacggccacgtcgatgtgcccgaccgggcgcgtaaggagaagaagctgctgcgcaagctcgacctccgcttcagcatcctcatcctcatttacatcctgtgagcagccttcgtatctctgtctgctgaacgcatcggctgactcaccttcccttttgattctagcaactacatcgaccgcaacaacctgtcagccgggaagacgcgcggcctcgaggccgaccttaagctcaagggctcggagtatccgacctgcctgtcgatcctctacgtcggatacatcttgtgcgtgtatgctcggcttcttggttctcttccgacccgccgctgacagccggcgcttcttgccgtcccttctcccttcaggatgcagattccctcgaacttcctcatccagaagctcggccggccgtcgatccagatgtcggtctgcatggccctttggggcgccatctcgtgcctcgccggcatcacgaccaactttgccggcatgctcctctgccgcttcttcctcggcttcgtcgaggccgccttctttcccggcgccctcttcctcctctctcgttggtacacccgcaaggagctcggtgtccggacgaccatcctctactgcggctcgctcatttcgaacgccttcggtcccctcatcgcggccggtgtgctcgagaacatggagggcacgctcggtcaccgtgcttggcgctggctcttgtgcgtcctcttcatctctcacgtctcgcacgaaagtctcctcgactgaccttccgacttcattcgcagctacatcgagggtgccgtcactgtcctcgtcgccgtcttcgctgtcttcatcctccccgacttcccgcataactcgcgcggcttctcggacgaggagcgcctcatcgcccagcagcgcatgcaggaggacgccggcagcgagacggacgagacctcgtttatggaggcgctcgttctctgctgcaaagacccgtctatccacctgatgtcgcttaccctcacggcaatgtgagtaccttctgaccagcggtcggtgttggtgttcttacgctgacactgctactgcgcctccagggtcatcggcctctcgttcaaccagttcttcccccagatcacgaccagcctcggctactcgcgcacgatctcgctcctcctctgcgcgcctccttttgtgtgggccaccatcgtagccttcgccgtcgcccgccactcggacgccaagcaggagcgcttctggcacattgtcggccccctctgcggcggagtgagtgtccctcgcttaacctggcctctcacgataccacctagactgacagtcatcgctctccccttttcagatcgttggcttcatcattgctctctcgacccgcgccgtcggcggtcgctacgtcagcatgttcctcatggccagctcgtacgccggcttctgtgtcttcctctcgtggctctcgggctccttcccgcggccgccgatgaagcgggccgtcgccatcgcttggatcaacgctttcagccagcttggcaacattaggtgagtctgacgacccgactttggcgttaccttcttgctcgctcctttactgacccccagccttcgctatcaccccgctcagcggcgcatacacatacccggccgcatggggtccgtcgtaccgcaactcgttctctatcggcatcgctatgttcgctgcaacatttgcgggcttgacacttcaccgcctcatgctgcagcgcaagaacaagcagatcgagaaggccgagaatgagggcacctccatctacccgatgggcttccgtcttcttctctagactcatcgtctcgctgtacttctactttgcaacctcacattcatgctcctttcttctcagagaggcaaggggcgcactcggagggtcgactgcgcgcgcgcgcgactcggcctgctgcttccaacctccgatcgacacccttcctccttcttcccggcaacgcagacactgtgtacggctgggagtctgccaatcgtgcagggcgcgccccggtcatgatgagcacgggcgagtcaagctgaagaaaatctcgtccttcgcctggcgatgctgcctgaaaggggcgaccgtgtccatcaatgaaatgcaaccaaagagacggcctactaatgcacgccgaggccgacgacagccatgacgccgccgacgaggtgcaagctgcctgtcacgaggacgtgcagggatgcgtcctcggcctgatctgatcgcagtgcttgcgtcgccgcctcgatcgacggcaggacgtgaatcttcgccggcgggaaggaagggttgagggcgaggaaggcgtccttgagcgagtgttgcgtcaggagctcgtcatccgggccctcggcaaccgacgtcaggtctgcagtcgtcaactgacggtcagcactggtctgacgtgtgagggactaaggcaggcggcagactgaccgcctttgctgacgccggacgaataagtcgtgttgctgcaaaagatgacttcgtcgaaccacgtcccgcggtcggtcaggtcgctacctgtagacgactgcgacagtgctggcgcccgagcctggagggcctcgagaagcgtgtgcgcagatcggccatgcgtgcagttgaagacaagcacgctggcgagtgagacatgcgtcaggattagctcgcgcgctactcattttagagactggcagacgaacgcaccgctttgcgccctttggcggcgcccgatcccagaaccactcgccgcagacaccgaggctctcaaccgtgtgcgcgccgtcaagatgccagcgctcggagccgatctctaagagctgacaccggcccggccagcgcgcgccgtcgaggccctcgacggtcgccttctcaagaggcccttcaagtgccggcgggtcgaggtgagcgagtgacgacgggaccggtcgtgacggcgtcgacgtcagggccgcgttgacgagggcgatggcgagcgaggcgttggaaagttgatggacgccaggcaggccgagcttaatctgcgacagctctggtcggacaggaatgatgttgagggaggaagcctggaggtcgagacggtcagagacgggccgtgccagatgagtgcgctagatgagtgcgcattcctccgaaacgcacctgcagctcaacggcgcgcccgcgaacgaccttcatcgcctcgtccggctgctcgacgctgagagccggcacacccgtcttgtagatccccgccttgttccaagcgacttccccgagcgtcgtgcccagcagcgggacatgatcgagcccgagactcgtgatgccggtcgagagcggtgcggggacaatgttggtcgagtcaaaggcgccgccgacgccaacctcgaggatcgtcgccgagacgcgctcgcggaggaacacgtggaacgcaaggagcgtcaggaaccgaaagtagactggcttgatcggtgtcgatggcgaggcgaccttaggagagagatctggacgttagcgaaggcgcggaagggtgaggacgcgaggcgacgcacctgcgtgttggactcgagccgctcccagacctcaaagaagtacctggcaaataggtcctccgagagcggtatgccgtcgatcctgatgcgctcgcgcacggcgacgaggtgaggcgaagtgtagagccctgggagcggtcggagttcgccggtcagcgttctctccggagaaacgacccgactactccctcgccaggactgaccgactttcatcatctgcccggcctccctcggacgggtactatgtcggttgagactcctcagcaggctgtcgcagaaggcgctcgtgctgcccttgcccttggtgcccgtgacgtgcaggacgttgagcgcgttgaggtcgtgcggccggtggccgatccgggagaggtagtcgttcatctcaagcagcgccgtcggattcgggacggttccgtgcagccggagggcggcaatcgtcgccgcgtttgattgaagcgaattgagcaggtggatcgcatcctgcaaggagaaggcggccgaggtgcgtcagggaagggcgcaagggattggtcggccgaatgcagcgaaggagagcacggcgtcaagcgagagccggccttgggtccggcaacgggcttttcacgcaccttgtacgcccgtgatgacagcgtcatgttcgatcggccgtctgcgactctacagagactgcgatctgtaggaaggaggagagacgctgttcaagagcaaggctgggccgccggcacatcacccctttcgcctgcgccgccgcgtcggaagccaacgcgtccgcgcccccgcagctcctccagctagcctcaacaccaacctcctccccaatgtcccgctcatcgtacgtcctcggtacgcgtgcatgtcaaagcttccagtctgctaatgcctctcatgcgctgctgtcacgctccgacccgctcctccgccagacccgtcccgccggcactgctcgagaagcagcaggagctcgccgtcctgacccgactcaaaacggccgtcctcgcgctcgaggagcgggcagcccggctcgctgagggcgctgatgtgatgtccgacggaggcgatggtacgctggcttctcgggtggctattgtctcaagagaggcatcgagcgctgacatagttgcctgcttgccttaccccgacgttgcctccctcgtcgcgtcgcggcttcgtccaacctgcgccttaccctgggtcatgcagctatcgctagcgtcctgtccaactggtcccagatcttccgcatcgtccacgacgcaggtccgtcgctgcacggctctgctcacgcgcgtttagggctctgaggctgatgctgctcgtcccattgccagccccgaaagacgttagcctcgcctcatcctcgaccagtctgcgtgacccccttgcccctggcgaatcagaagggaccgacgtcgacgacctcgccgattcgggctcggccgagcaggagccggtgccgacgctcgtccggcttgaagtcgcgaccgtttcgggcagctcgtaggctggtcctcggttcgccggtcgcgcacagctgggagagcgagggcgggaggaggagcgtctgacgaaccttcgtagagtagacgggggcgaggcgggaggacgcatgtactatgagacgaccttcatgacgacgaacgctgcacactcggctgcagaggccgagggcgaagaacaacgcttctcgatagctgaatgggagcggctgctgacagatcggtcgggcaagagtaatcgctacagcatggtacatgagcgtgctggaaaaggggtgctagatgatgcaatggacaaggtccggataggaagcaaaggagcgaccgggtgaggagcgttttagtgggcatcagccttggcctgagcggcggcggcgtccttgcgggcgagctcgagctcctcctcaatcataatcctgcaggagagaggcagttgggtcagcgtctgccgaatggcaagctcagtgcaggcagaaggaggaactcactgctcgtcgatcttggcaccgcgcgagggctcgttgccgtgggccttagcggcggccgtcgggagcggctccgggcgggcctcacgctcagcctcctccttctccttcttctcggcggcggcaagcgtgttcttgatcgagcgctcgtccttggtgtcgaggagcgagtgggcgttctcggtgccctcctcgtacttctgcgagtgggcgtcacggatggcctgctcctcggtctgctggtgcgctggaggcggaaagaagagatcgcgaagtcagctagagcagagcaaggggagaaagtcgcagggacgaacagtcctgctcgttggagccctctccgtggttggtggtagcgggggcgggggcactgcagagcggcaaggccgaggtcagccggccggagcgagatgacaagcggcgagacaaggcagacgcacgacatgattgagagtgtgttgagtaggggtcaaaggcgaagggaaagaggaggggcgatgtgatggttgggacggtcccggtagcttccttcgaaacgggcctttttcaagggaggccggccgccgtcgacacttcgcctgcggccctgacgacgatgacgcgcgggcggagtctcgatttcagcagcagcatggcgcaagggcggaagaggccgtgtaggtccttgccctctgccgcctcccgggtggctaacgaggaggcagtcgcatctgaaatgaagagaacaagagaaagctcgaaggagctgctcgagacccagcccagcggagggagcgagcgagtgagagttgctgctattgacctgttgtcgctgcgactgcccgggctgccgagcctggcgctgcgcctgaacctagcctctggcactggacgatcgctcgcccgcagcgcgctcggctcggtcgccagccgtttccgtcaacagtcgccgccgattcctgccaacgacgacctgcccttgttctctcgcacacagccccgttcagcctcgtacgtccgcgagtgcgcttgcatcacacttctcctgatgcgagctgccctcaaactgacgctcatctgccatcctgtgctcgctccggcgcccgccagctctctccgccttccctcttccctcccttccttttcagcccaccatgcctcttgaaaaggagctcgccgacgcctcgctcgaggacatggagcccatcgccgccacttcgggtgagaaggccggtcatcccgagatcacgtcgatcccggccaactacacaatgatccaggtccgtccgaggttcggaccctccgcgcgcgtcaagctcgagctgacctttacacaacgcgaccggcctcaccctgtagttctttgaatggtacgccgagggcggtggcgtccactggaagaagtttgagaaggagtcgaagcatctcggcgagatgggcatcaccgccggtccgtcacctcctttccccggctctcgccctggagcgctacaaagtgctgacgacgcgcgtgcaatctatccgcagcctggcttcccccgccgaccaagggctcgagcatcgacggcaccggctacgacgtgcgtctcgtccccttttcacagttctagagcccgcccaaggttcagctctgccagctcgtcgctgaccatctatggcctcccggcttcctctgacatagatctacgacctctgggacctcggggagttcgaccagaagggtggcgagcgcaccaactggggcacgaaggaggagctcgcccgggccatcaaggttgctcgcgagaacggcgtcctgtcgtacattgacgccgtgcgtccgctacgtccgcagcctgcccgataaacaactacagctgacgcgcgctcaaacgttcccttgcttcgcgaccatgcaggtcctgaaccacaagtatatccgcagtcccgagcaaggaaattcccagacacctcgctgacaaccgatttcattgctctcgcaggatgggcgccgaccgagccgagaccttccttgccaaagaggtcgacgacaacgaccgcgagcacgaggtcacccaggcctacaacatcgatggctggacaggcttcgacttcccggggcgcaagggcaaggtacggcgctcgcttgctaccttgtctatcccttctctcgacctcgctgacctttccctcgccctttgcgcacctgtgacgaagtactcggagatgacttggaacttcaaccatttttcgggcgtcgactgggacaacaaggccggcaagaaggccgtcttcctgatcgagggcaagggcaagggtcagtcctcgagccttcgacctttgttgcgataacggcaggcgctgacgcgaggagtgtgctgcagccttccccgaccacgtcgacagcgagcacggcaactacggtgagccgtccttcatcattttgcttcacttcgcgttctgacagcgccgcccgctctcctctcgcttcagcgttcctcatgggctccgacatcgagtacgcatgctgcagccgccgctttgtggccctccgctcctttctctgatctgacgctgatcggcgccgcctgcccttcttgcagccacgaccacccggaggtcgtcgacgtatgtcttcgttcgcttccatctacatttgtgcttctcgctgaccgaaacgcaccttcttctcgacaacaggacctcaacaagtggggagtctgggccatcaaggagatgggctttgagggtgcgtccacttgaaccaagcgtcaccgccctagccggcagctcactcctcgccccctccaggtatccgcttcgacgccatcaagcacatcgaccggtgagcttctgcttctttctcctcgatcccgctcttcatctgacgcgaatccttcccctccctctgcagcgactttatcggtcagtttgtccggcacgtccgcaaggaggtcggcaacgacaagctcttctgcgtcggcgagttgtgcgtccgatcggctgcgagactgcagaggcacggctgacatccgctgcggcgcactctcagctggaaggacgacccgaacgccctcaccgactacctcaacggcatccaggtgagcggttgtgcagctggcacaagtgctctacttgaagtgcagccgctgacctccgatcggccgccgtttgcagaatcaattctcggtctttgacacgcctctccactacaacttcaaggaggtgtgtctcccccaaggcctttcgctgcgtcgtgcgactctgggcactgacagatctgtcattgctccatcacaggctggcgaggcgggcgcttcgtacgacatgcgcaagatcttcgacggcacggttgtccagtcgcggccgatcgacgccgtcacgctcgtcgacaaccacgacactcagagtgcgctttcctctcctctcgccctcactcgccgacgtgtagctgactcgcccgtttgcttactttcagtcggccaggcgctcgaatcatgggtcaaccctcagttcaagccgctcgcgtagtgcgtcgcctcccgtacccatacagagttaaaggccgccgctgaccccttccgacctgcctactcgccggcacagctcgctcatcctcctccgcgtcgatggctacccggcggtcttcggaggcgacctctacggctgcggcggcgacaacccgcaggagccggtctcgcaggtgcgtcgctttgagccttcgtctccggcccgttgttgactctcccttcttcagctcgacgacctcatccgtgcccgcaagtggtacgcttacggcgagctccgcggtcagtctcgtccacctccttgctggcgaccaacgagtgctcaactgacgcctcgacacctgctctgctccttcagactactgggatcacccgaactgcctcggctgggtccgtatgggtgacgaggagcacccggacggctgcgccgttgtcctctgcaacggcaccgaggacggcagcaagcgcatggaggtcggcagcgtgcgtctcctcgaccttctctgctgctgcactttccttccgctggctgacgcgactttccccgacgacagcaccgcgctggcgagaagtggaccgatctccttggctggcgccagggcgaggtcacgatcggcgaggacggatgggccggttcgtctagttccactttacttcagctgccgccgcgttactgacgagggtcgcgccctggatcgtctgcctcctcgcagacttcacttgccaccccaactcggtctcgatctgggtcaaggaggagtgcgtctaccgtcattgtgctagcaacgagttcccttccggcctctgctgacatctcgccccgactctccttttcagcgccaagttccgcgagacgtttgccaagaagtaggaccctcctttaactgagacctctcgcctccagctttctccttctacttcatcctctgcatatttcccgggcactagattcacacacgtagatggggtcgctacttaatggcccgctcgcaaccgtatcaggctgagcgacgtctttcattctccactatatatatacatgggcttcaacgcgcgatcaatcgccccgagagaagctctcacaagtgctcgcctgcgtcgtacgtccatttcagaagacccggctgccgaccttagctcgcgggtccggccggacgagacacgtcccgccgttgtcggcctcgacgccgagagtgaggcacgtgctgtagagccggccgagccgcaggcgctcgacgttgacaacgcaacagatctgaatagcggacgaagaagcagggtcgtcgtcagcgcaatgactctgagcgtcggcaactcgggccaggcgcctgcccaacggacggcgcgctcctcgacgcaccttcgtcccgatgagctcctcgggcgtgtcgtagcactcggcgatctgggtcgacgactggcgctcgccaatgactggcccaaaatcgatcgtcaggaagaaggctgggacgagggccttgggcgtccgcttggccgcggtgatgacgccgacgcggatatctgtcgaccggggcgagggcgagagggactgtcagctccagttgcagggaaagctggcgagggctcagaagcgcgcccttattaatgggctcgtgcgatacgggaaggtaggcttccttagttgggtgcagcggtcggtcaccgtcctccccttcggcggcgggagccggcgtcgagccgttgacgacagacggagggacctccgtgctagacgtggcagcagcggcaggctgctcggcctcgacgggagtcggagcagtggaggcgtcggtgttcgttgtcatggctgagagagaggcgtacaacaggctgaagagagggcgggcgggaagggggtcactgtgatgggcgtcgaaggtcagcttcgaaccggctcggcgctcgtgccgaccgcgcagggacgaacgggtcttgcccgcgggcagcgacggcctgcaaccgctctctttgccctgcttgcctgcctgcctgctaccctgattcttgctttgccttactcattcaccactgcctgtccttccgcttgctctccgaccggtctccttctcgtccctgtcctccactccccctctccctctctccttctctgcatgtacggtaggatacacctcgcacattgccaaacgacaagcaacaacctgcgtaggggatttagctcagttggtagagcgtatgcttagcatgtataaggtcacgcgttcaattcgtgtagtctccattcttcgcaggcctatttctttttgcctttgagggcaattgtccttttgttcgcggaaggcggagagggacttctgcgcgtcttcaccttgccatcagcccttactcaactgattgcagggcgcagaccccactggccggctcctgctccgcccggcgcccggccggaggcatcattcaacctgcgaccgacgcgtcgacccaggtcggtaaccctaaggaagggtgatgaatcgcccgcgacgcgtcgcgcgcgcccctcgaccgtcgcagcctgccttccctccgagctgacacccgccccttcatctatcctcccttcttcccgcctctctccattcttttcttccctctcagcgctacctccccccttttttcattctaccctactcctcctttccatctcgcggccaaaatcccctcgcagtcgcccaagcatccggcctcatgttctactcggacgccatcctcagcaagaagggcgcgctcgccaaggtctggctcgcggcccacatggagagccgcctgaccaagggccaggtcggcagcgtcgacgttgagcagtccgtcagtgagtacccttcaccctctctgagcgacccttgccggccaggctcgcttcgtcccgaccggccgccttagctggcaacttggtgggagcgacatcgcgagggcaacctcgcgcgggcgggtcgtgcttccggtcgatagacatcgcgtcactcgtcaagccgcccaagctgacctcgatgctttgttctcctcacagaggacatcctgcaagagcaggccgagccaatggcgctccggctgtcgggccagctcctgctcggcgtgtgccgcatctactcgcgcaaggccaaatacctgctcgacgactgcaacgaggcgctcgtgaccatccggatggtgcgccatcccttccccttcatacccgtcagcccgttcggctcggtcgcttatcctcgaactgcgtccgtcccctcgacagcaaatccgcccggcgttggtcgacttgcccgatgaccagcttgcggccaggaatcatgacctcgacatcgacgacgccggcgacctcggcatggagattgactggtgcgactgcaagctggctcagtcagccgcgaaactcagcgctgacctccgctgaacccgtctgatctcagggacgcgcctctgccctcgttcgagtttgacgacgcgagctatggcggaggtctgccgcgacagattacgctgtcgtccgcacacgcccggcgtctcggcctcggcggcgacaacgtccgcgactttgacgtcggcccgtcagacggctttgcgtcgcaggactttgatctcggcctcgacctcggcgaggacgccgatgagacggttgagcttggccgtcacgccgaggccaacctctctggcacccgcctctcgctcggcggccgtagtctgaacgacaccttttcgaacgcaggcgacctgtcgcgccggacgccgggcgcgatggacatggacgtcgactttgacgaccagcagccgatcgaccttggcctcgacatcggcagcccgcggctggacgacgactttggcggcatgggcggccagccggacaaccatgactacggcggcggcatggactttgcccctgacgagggcgcccgctttgacgacatcccccctgcgatgccagacctcgtccttgatggcaagcgctcgaggagccgagagtgtacgtcctgagcgccctctacccccttcgcttgagctcgatgtccaaactgatctttcctctacactcttccagcctctcgcctctcgaccccgccggctgagctcgacgagtcggccgccggcaacctcacgccgcgaacggcagcgctcgtctcgtccatggctaaccgggccgaccgggcagccgcgcaggcaggtgacgccacgccgaccgggcccaagaggaagaagacggtgcgcgtcatctttgacgagacgaccgagctcgacgcacacgactcgctctcgcaggctgcgcggcgggccaaggacctctcggcgatcctccagcctcagcgcttcatccctggcaacgccgccctcattcgctttggcgagatccggcaggacccgctcgccttctacctgccgacgcggacacgttccgacggcgaggttgtcctctacgctggcccgcccgacctcggccccgagctcgctcagatgttcgagtttcccgtgaccggcctcctgcgccggcgcagggaggcgggcgaggacgacgcggctgctcgtaagcgtcaacggctcgaggctggcctcgacggcgatgacgatgaggtcgagctcggccgacgaaacgagcgcggtaagtcgctcgccggcggtgccgacgacacgttggactttggaggcatggacggccagccagacgaccaccttgactttggcggtatgggtggccagccagacgacgaggaccggcccttcaacccggacgacccggcgtttgacgaccttggcggcggcggtatcgacttccagcccgacgacggcaacttcctcgacgaccagctcgtgctcgacgacgcccggagcgaccgcgcaaagtcggtcatctcggaacgatccggcctctctggagcgagtaacgggccgaggggcgcccggcgggcccgggcaggcagctcgcgtgcaggcagtgcggcccgcagcctcggtgccgaggacgacgaggagaccgagagccagcgcgtgcgcgagaaggagcgcgcgctcggcatcctccgcgctcagctcggcaagcctgcagcttcggccgtcgacggcgacttcgaatttatcgacgacgccgctgacgagaaggtccttgacttcaagacggtcaatgcccaggttcgtccttatgcgaccgcgcttgtgctagcgtctctttcctgaccggttcatcctcctttcagtcgaaccgcaaggccgcagccggcttcttcttcgagcttcttgtcctgggcacaaaggacgccgtcaagctctcgcaggctgcgccgtacggcgacatcgaggtccgcgccaaggagcgtcttttcaacgacgccatcattgcctaatcttgctctgcctcgcgcctacttattcgcaacgtattcggatggaatgacttatgatggatcatcaaaggcggatcgcgagcgaggctgaacaaggagggcgtgtcatgggcaccttgtcgatcggccggggctgtcgaaagcaggcggcaggcagccgaggcattgagggtgaaagagaaggaaggggcatgaaagagaagaccaacagcaaccaacaacttgcgccttcgagaggctgatcgcagcagaccagaggttccgcgccggcgccgcgcccccccccctcaggcggcggccttgtcctcgtcctcgtcctcggcctcgtcgccggtcgcccagttggccgccatcttgtgggccttgagcacgagcttccgccgcgagcgcaccttggcttgggcggaggccagtgatgctcgcagctcagtctcgtcagaccgggccttctcggtcgcctgcacgcgctcggcatgtgcggtctcgagagcggaagtgccccctccatgctcgccttttccatctcaagccgctctagctcggctttccgcgagggaatcggggccagggcagcggtggcagcagcgccgactgagaggccgatagtcgccggcggcgccggcggcaccgagccgggcgcaacagctgccgaccgggtcgccgagagctgaggccggccgcgtgtcgtggcaggagccgggaggttaccgtcgccgctgcttgcaccggtggcaggctggttgcccgcggccgtcgccgtcgtcatccggacgcgcttgagggccgggcggccggcggcatcgtcggtcgccgagccgtcgacattcgctggtgccgacttgcggacgcgggactggctggcctggctcagcgctggcatcgaagcggggacgaccgtccagttcgacggcaggacggcgggccatgggtggtcgcgcgcacagaccctcgaagccgggccggtcgactcggggccgccgcgaccgccaccgcagtgctcggaaaggaaagtgacattgttagtccccttgaggcaagctgggcactggaacagtccctgctcacggacgacatggtatgctggaaggggcacagggtcgatcggcgtcagtcagcggcggtgacgggttcacgcgcagcagacacgtactggtgccgccctcgatcgtgaccttgcagacgtcgaggtggacctagcggtcgtgctcggcgagcgcggcagtgtcgcggaagaacagatgcggcgtgcaagcgtggcactcaatgcggtggatgactgacgcctcgaacgcagccttgggcggcgctgctgcggccgccgtcgtcgtcgggccccggctagacaagccgacctgcgttgctgggggcgggctggcgggcgctgaggccagagtcgacgacggcgacggcggacgggagccgatggcgatggctgagctgtccggctgctgctcggacaggttgcggtcagcgtgggcggacgcggtccgggtgcgcgatgcgagcgacacaccgtcgcggccgccacggagcgcgtttctccggcgaccggctgcgtcgggctcggcggcggaggtgtgccagcggagtcctcgtgctggctggatgaggcgtcgatcgagctgtcgagagagcgagccggcggcggcggcagctggtcctgacgagacagacaggggccgccgcgttcgtcagcatgtctgctccgctcagcccggcatggctgcagtcacaaaagtacggaccggcatctcggaggtcagggctgaagtcgactagcgggctcgacagagcgaggaggaggaggaggaggaggaggaggagggagaggcgagagagatggttgtcgctgggcggacgcgtcgcaacttgggtgcgcaggcggccgactgcgcaggtcgcagtcgtcgcccccttcccctacccccttgccccctccggccaggcgcgatcctctctgaaacacccaacgtcgcctggtccgacgtcgccggccttgagtcggccaaagaatctctcaaagaggccgtcatcctcccaatcaagtttccccacctcttcaccggcaagcgcacgccctggcgcgggatcctcctctatggcccgcccgggaccggaaagtctttcttggcaaaggccgtcgcgaccgaggcaaagagcacgtttttcagcgtgagctcgagcgacctcgtcagcaagtggatgggtgagagcgagcggtcagtcccccacacgcatctcgacacggcccgctggcgaggcgccgaccggtcgacctgacgctctccccccccccctatcacgtcgtaggcttgtcaagcagctgtttcagatggcacgcgaggccaagccgtccatcatcttcatcgatgagattgactcccttgctggcacgcgaggggagggcgagtcggaggcgtcaaggcggatcaagacgggtgcgggccgccgtcctacctcgtgccgagactcacgcaagaggatggcaagagggtactgacctgtctcatccgcgcacccgcttcatacagagtttctcgtccagatgaacggcgtcggcaatgacgagacgggcgtccttatcctcggcgcgaccaatatcccctggcagcttgacccggccatcaagcggcgcttcgagaagcgcatctacatcccgctcccggaccctgatgcgcggaagcgtatgtttgagctcaacgttgggacgacgccgtgcgagctcagtcagaaggagtatcgccagctggcagaggcgacgaaggggtcagttcctggtcgggccgtcgggcgcgtagcccctgttctactctccgctgacacgctcctcccgaaatcgccctcgctgaaagctactcgggatccgatattgccgtcgtcgtccgcgacgccctcatgcagcctgtccgcaaggtcctcagcgcaacgcacttcaaggaggtgcgcaggttcccctcccccgatccacccactgcgctgcccactgacgcctttccgctcaaaaaggtccgcgtcccggcaaaagacgacccagacgcgctcgtgacgaagctcacgccgtgctcgcccggcgacgcggccgcgaaggagatgagctggaccgacgtcgacggcgaccagctccaggagccgatacttggcttgaaggattttttgcgcgcgatcgcaaacgtccgtctgccctctgcatcgctggtggttgacggccgcggctgctgatgcttttcctcttgcttcggtctacagactcggccgaccgtcaccgaggcggatatcgtcaagcacatccagtttacgaacgagtcgggtgcgctccttttctcccttcttcctttccgaccagggcgctgaccaaccaacttgtcctttccttgcaggcgccgatggagcatgatcgtcggtcggatgagcatgcattcgaccggtcacgccccgcagccgctcatgtcctcagccccgtctcgatcccccaccgtttcagccctgcaagccagtcgcccaccaactcctgatcgagtgcctcgtccagtgcgtggattgccggcggcatcgcgctctcgcgctcgtccgtccccgtccaccagaaagcccagctctcggccctcgcgccctcggccgcccgcaagaggccggtcgagattttgaggatgccaggcatcgagcgcgtgacgacgccgagcgaggccccgcacgagccggcacagcggtagcgcgttgtctggtcggaagaggcgtaggcgactgcgccggggatgcgggcgaggtcgagcaaccggccgccgttgtctggcccgagcggggccgttgggtcggagactgtgtgcagatctcgccagggaacgtgtgtgacggccagagcgggcaggcaggacgccgtcgtcgtcctacaggacgcgcacgcgcaggccgttgtgagaaagcgccgtcgggtcgaaccgttcgctgttgccggcgggttgtagcagtacgcctccgcctcagccgtcgggcgcgagatgacgaggtcaaccgagccacagtcgcagcggacgggcagtcgctcggccgtctgctgaacagccccggccggcgcctccctctcagcattggggacgaggggcgactcatctgccttgccggtgaaggcgggcaggtccggcaggaaggccgcgacgcccgtgtcgcccgggccttggcaatactcaaagccggtgactttcaagacgccagctgtccgatcgagcagcccaacatagacgccccagacctgctcgccgttgggacgcgtaatgcagccgacggcttgtgcgccgcacgtcgagcagcggtagcggaggtggggcctgcccgagccccccttcatctcgcggagcgtcagcgtctcgaggacgcttgtggccggcgcggccggcaggtcgacgacgacgacgccgagcgagcccgtgccgtgtcggcagcggtcgcaaaggcagatggccttgcgctgcgggagcgagtcggccgggagcgagatgggaaggtcgaagcggccgcagtggcagcgggcgacgaggtcgactgacgcgggcatcctcggaaggcggctgcttggggcaacgcagacatttagcggctgaagtaagaccgaccagtcgcctctgattgcctaccttgtagagcgagaaacgagccggacggtggtgggtcgaagaggaaggagctcgctttctgcgtcacgtgagctcgtcagagcgaggtgccggcccgagggcgcgcagtaaggcggaccaccgagcctggactcaaggcgaggctgtctgccgccttcctgctcgcagaccttccgccgccttcccatcctgccctagtcttggtctcgagatggttcatcatcccattcgctcggtcgcatacgtcgcgagcgcctcgataaagctcgacaagtcctccttcttgacctcgacgatcgacgtgtcgaagcggtcgtgcttcgtccccgcgttcgactctgacgcggcgtcttggaacgcgaggccgaacttgctgtagaggcgcgacgagaggcatgggtcagccaaagaggcggcaggcgaggtcggatgcgcagtttcgagacgcacttcttgcgaacgtctccgtactctggcgcgcccgtgacgccgacgacaacgtacgtcccccgccgctcgtcgaggcaagcaacgacgatcggcaggctccgcgtccgacgcctctcttcgccctgctgcttggcattcatcgcgccgacgagccggtcccggagcgcgtcgacgagccagagcgccaggcgcgagagcgtcgagggattgatgaagagggcgaggtcgggtccctcggtgatggccgcgagtcggaaccacttgagcggggcaatcttgcccttgtcgatgagcgccgagccctggcggatgatggccttttgcagggccatgcagagcggtaagctcgcatgcaagagtgtggcactagtgaagggcagaggtcgcggcggtacagtcagtcgtcgttgacccgcagagcagtcagtccacgatgcactcactcgccaccgatccggacagcgtcaaaggcgctccagaaacagccctcccaggcgcgctcaccgatcggctcggcaccgtcctcgcccgcctctccgtcggccgcctgagctgccgccgggccagcgaccttgtcgcccatggcccagagccgggcgccgccgaaccactcgccgccgcccttgctgccctcaatctcgacctcgatccggacgccctcggccgcctcgagcaagctcgaaacgccctccaccgcgtcggctgccgagagtggcagtgaccggaagccgtacgtccgggtgaaggatgggtacgtgagctcgaccaagccatactcgggggcgatcgaatccatcttggcaaaaagctcgcgcttgagcttgagcgacatgttggagtaactctggtggcactgggtgagcgagaagctgcagtagggggatcagatcagcaaagcgcaggcgaagcaggaagagggcggtgaatgacgcaccccatcttggcgagcatgccgtgcagccgaccgcggcccttctcgcgccagatgcccatcttgctcgcaacatagccgctgtgggccatcgactcgtagaggttccagtgccggtacatcgtgaagcgaagctcctcgctgcccttgatggcgtggtcgtcgggcgaggccgacgagacggtcgtcgacgaggggtcggccatgagcgaggtcgggttgaggcgagcgacttcgtcgaggtagagtgattgcagatgctcgtaccgatctcggtcgatccgggtcgagatgtattgatgtgtgaggccgagaatggccagcctgcggggtgctcagggtcatcatcggtccgagaagctgtgcggagcagagcgaggctgcgtaccagagcaggtcgttgtcctcccggccgagcgaggttgccagcaggtagacggtgccagcgaccgacaggccatagtgagttcctgcttgatagtagcggttgatgacgtagccgaacgctcgccgtcggcgcttgctcagaggttttggctgcgagacggacgggaggggacgaacgcgtcagtctctgcagatttcgagccgagcagttctcaagcgacttacattgccagactcgtccatcttgcgccggcgcttgggtttccgctcgccgtcctcgtcctcggagccggccgaggcgtcggtgacatcctcctcacttgagctctcgtccgacggcaggtcgtcgtccgagtcgtcgctgtccgagtcgctatcgggctcgtactatcagagggcgggggaaactgaacgtcagcgcggtcgcctgtcgtcaaagccgggttgacggttgggtactcacctcgagcgcctcgaaggcctcgcgctccttgccgagtcgcttcttgcctgtcccttcctcctcgtcctccatgaggccgtcgtcgccccagacccagacacgctcccgctcgccgccaaaaagattctcgaggttccacggccgatgggcatcgagcacgtggatgtgcaccggttggtagtgtgccggcagcggcgaaggtgcgaggcgggcgaggaagtgcgacgagagcggaaggagggagccaagcgagagcagtagcagcgtatgcagctaacagagcacgagaagcaatcagctactgcggcgcttggcccggacggagcgacgagctcgagctcaaactcacctcgggatcgccctccaagcttgtcgtgcgagcctcgaggtcggcgtaaccttcgacaggaaagaccttatgggggatgtcgtcgcctttcaacagcgtcgtccacatcctgcgtgagccggatcgactcgcgtctgtgcgtcagcagctgtcccacatcgacgagagggtcgcgaagcggagctgctcaccgagccgcgcagacgccgtcgaggtcgttggcgaccatgatgacgaggccgccgccgccgccctggccgcgggcgagcgctctccgagagcgcaagaggatcgacgagtacgcctgcgaatacgatggcgtcgacggcggcagcgaaggatgcgggatcgggaggagaggcattgcgtcgagaggaagcggtcgaggcggccgcgcgccggaggagagagggagtgctgaggcttcagggtggacttcggcagtctctgtgtcggtcggatgttgaggtgggtggtcgtgaagcgtcggtggaacgagtgcgagcgaggatcgtcaagaaggtcgtgagagtggaagggtcgtgtgctgggggttcagggacaggcgggcgtggcaaggcaggtcgaggtcaacgacgacgcgtcgcgcttcaatgaggttcggaggcagaacgaacagggacgcgccgggtgtcgatttacagccagcgtcattcggccgggcgcactcaaatgcggaacgggcagccagacgagcagcgggtcataagatcatgatgagatagaggaaaccgagatgggcgtgcaagtatctggtaagagcattcgagagatgcagggcgtaggcgatcctgggcgagacggcgttgacgacgcaaggcggccctcctcctggagacgagagacagagtccaacgacgagcttggtgggtgtcgacgggcttgcctaggtgcctgatgctcagaagctcaggtcgtcgccgctccagctcttgaagcagccgctgtcggcctcggtcaggccgtcgacgacgccaaggacgccccggacgctctcgtcgacctcgatgtcgccgtttcctctcgtcatgtcggtcgagacctttcctggatggatctgagatcaggaaaaggtcagtcggcgtgccagtgccaatgcgaggtttatgaggggcgcaccatgccgatggtccagcccccctcgcgcccgacgccggccgagccgtcggcaatctcgcctgcgagtttgcgcaggtacatggcagccgctgccttgctcgcagagtaggatgccgcaaccggagcccacttgccgagggtcggcaggaggctcgcacttgccagcagcgtcgagatgtagatgatcttggccggtcggccttcatctgggctcgcctgaagcagctgcaggaaggcgagcaccgtcagggccgttgcaatgtagttggtgttggcgtctgtccgaagctcggcggccgacacctgcgacgccgccttccagccgctgctcatcgacccggcattgaggtagaggacgtcgatggctctcttgttggacgcaacgaaggggatggctttggttgcctcgacggcagccttcatttgaagcgggcggagttcggtcaccagtcagcactgcaacgagacggagcctgggtcgggccctaccgctatgctctcttccgaggcgacgtcaaggacgaccgtcgcgatgcgtccttcgctcgccttgacaagctcctggaggctagtcgagccagctggatcccgggccgcggcaacgactcgcgcctctggcctcgctgcaagctgccggacggtctcgaggccgatgccgctgcgtgtgcgacaggccgccaagcctaatcgtgtcagaagggggcgcctgggcacctgtcagtctagagggggtgggtcgcgcaccgggaggcgccggtgacgagccagacggtcgggcccatcgattctatgaagagtcggccgattgaaggtaggctacgagagatgatgctacagaggtgattggaacagcagagaaatgcgttgcaggcttggtcgagaggagactgaggtgggcgtcggagggcgctgcgcctccgtcgagagacgacctcggtgcggctcgtgtacctcctccgcgtgtccggattgggtgatttgcgcgcttgctgccttccttgaatttggtagccatttctcaggctcccccatgctgaatgaggcgggaaagaaacatctatgccagggcgtctaggagggcggtgattgtacaacagtgggcgagtcggaagactctctggacgctccgaagagaccgctgcggtgcggatagatagggtgagcagagcagttgctgggacgacgaggaatccaaggcatctagagcagccagcgcatgaacttgccggccttggtggtcggagggctcgggtcgaagtcgatctcagggccagggacgttgctgacgagatcgatttcggcagcactcttccagcccggccgacccgtgatgagccagtgaccgaggccaaggattgcaactatgggaagggtgatgtacctggtgcaggcaatcgaagcagcagtcagccgaccagtctcgcaatgtagatgaagagcgggacgcacgagacgatgaagtcacttgtgttccagccgcccgtcatgaagacggcgtagccgttgaagatcgtgatgacaactgacgcagcgagggacggtaaagggagtcaggattgcgcgaacgacagagcggccgcggtccgagacgcaccacaccagaacagcgcccagtacgccggccagggcctgagagaggacacagaggtaggcgcaatcagcgaccggctcgtgacgggcgactcgaaaggaagtactcactgccaacggttgtagatgtacttgctggcagagcgatcgatgccctggacctcgcaagcagccttgaagcgcaggaaggagacgcagatgctgccccactggatacagaaggtctcgcgtcagcacgggaaaaggcgcaggcagagcctgtcaacgcgacgcacctggatgtaagccgcaagactggaggaaagcggtgagaaaaatcggacgtcagcaccgaagagattgccagagcggtcatccggacgtacctggtaaggttggcaaaccacgtgaggaccgtgctcgagccattcgagagggtcaggtaggcgatcgggctaaaagcggcgctgaaaatgagggcgacgatgggcatgcccgatttcaagcacttggcaaagatcttgggcgcctggccgcggagagcaagaccgtagagcgtgcgggacgagccgtagaggcaggcggtcgcagccgagagggaggcgagcaggatgccgccgttgacgatcgacggcaggaccttgattccgacgcggtggaaggcgacaacaaagggcgacgacgctgcgtcgccagtgtattggagcagctccggatcgtcggacgggacgaccaggccgacgacgactgcagtcaagcagtagcgtatgtcagtttcgggcgtcgagacctgcaggcgagaggcgacacgaacaaatgctgaggacgtagaagacgagcaggcgccagaagatcttgcgaacacagctgtgcatgtttcggcgggggtcaacaacctcggcgcacgcgaagctgatggcctcaatgccggagaacgaatactgccgagccagagcgcaggcagcgtcagcgctgaaccctgattgcgattaagttggcgcaaactcacggcggccgacatgaggatctggaaccaagcgaggaaacggccgaggttgcccggcacgaggtaggccgcaaaggcgcctggattcttccaatagcgaaaacctgagagggtcgcgagcagagtcaggatgagggttcggaggctgagccttggacgctgagcgacgcaccgatgcgatcgtcctgggggttgccgccgaggtcgatgatgaggcaggcaaagatgaggccaatgacgaggaggaccttgagccaacccatggcgtgctcgacctcgccgtagacacgcgtgccgaggaagttgacggcgacagagaagagcaggaagccctgggaggttgcaagtggggtcaggacgaggccgagcggtctgcagctgcgagcgcagagcgacatacggtgatgacgccggccagcttgaccgtcgtcatctcagtccagtagcctagaacaagcgtggcgctgacgacctcggtcggcaaggaaatgacggcgctgtaccagagctgtggcgggcaaaggttgccgtgtcagcggacgggcttccagggcataacggggagagacgcaccaagtagccgagggcgaagctggatacgaaagtgcgagtgggtcagcctctaaccatcccagttatcggccatcagcgagacgaacctgacggaggggtggatgtagcgctgcgccatctgaatgtagcttccggcgataggcgcgaagcagagcatttcgcccagcgcctgcattacgctccaggcaatcgagcccatcctgtaggaatgacggacgatcccgagagaggcccgaaaatcggtgcagggacgattttccaggagagaagcaagagggtcagtagattgattgcacgacgagtccagtgaggagaggttccgcacaggacgtaggcgatcaaggcgccggcaggtcccgcggtcgacagggcactacccgagtagatgaacagacccgcgcccagcgttcccgccagggcaatcatctggacgtgacgctgctcgagtgtgcgttgcatgccgtcgtactgcggtcagggacagtcggggcgaggcaaagtgagctttcgggtcaggccagcgaccggaagcaagctcaggtccagacagacgtacgaggcccgagtgaacgtcgaccttgacggcctctgcgtcatagtcgacggcgtggaccgaaggacccttctcctcggcatagttgaccttctcctcgatgtcatcaacggaggacggcatggcgggcgctggtgagggcgggcgggcggacggcggcggctgagcaggcgggctgctaacggggacggagaggattgaaagcgagaatgcgcttggagtttaagagccgcagtctagcaggacgggttggaagaaggtggctcgtggtcgagaagagggtgcggtcgtgtgagcagctggaaggcagagttgttcaaagaggtcgaaggcgcgagcgcgcgcggccggacgaggccgaggccaagcgggacggaaaaagggcgatcgaaatcgacttcagtgcttccgagcccgaggtcatcggcgttattctgtcgacatccggagaagcggcgagtatggcgcgagttgtcgacagcgacaggtgcaggcgggctgaggacgaaggcctgacggctgcagccagacgacgatggctcagggcgcagatgtcacgggagcctcacgggagcctcgggctgagcaaaggcaaccgcggaaggccgggctctgagaggcaggatggcgtccggagcgaggcaaagtggttgcctggtgcgaatgcgccatcgatacgccaactgggcggctgtggaacctcagatcagaatgcctggtgtatgccagtcgatcggggacgagatcgctcgtctgagcgtcgagtcgccttaccgctcctcctgctccgaggatatcagtctctagcgatcacgttgccgtgacttgtggcgacctgactcgtcggctgcgtctggagcgagggcgacagcatcagatcggtcggtcagcgcgtagcacaaagacagacataagacagacagaggagccaagacgcacccaagtcgagcctactgctcggcgtctagttgcgtccctcgcgctcgctcggcgtccggacgccctcgctgaggtcgacgaccctcgcgcccttgcccgccagtcgctcggcctgctcgtcactgtgcgtgatcagcaagtaggccttgggcccacccttacccgcccgcctgcgggtctcgctgccggccgggttgtgctctgaccgagggaggaaggagagcagggtcgactcgaccttgaaggtcgtttccgggtcgagcgccgacgtcggctctgaacagggcagacgaagaaagcgagcatcagtcgaggcacagcagagagagatgctgacggccagaacgaaccatccaggaggatcacctcgggaccgcctccgaagccgttccctcgcgcaaaggcagttgcgagagatatacgttggccctctccgccactgagatcgccccagtttcgctcccacagcatgcgcgggacgtcccagtcggacgcaagctcatacgggtcgagcacgtccgcctcgtcgtcgccattctccggcagggcgacggcttgcttgcgttggaggaagcccggaagccaagacgagctcgaagacgacgacgacgacggcgaggcgacggacgaccttgagcggaaagtcttgaccgtctcgaggaagctcgtgggcgagccagggaggagcgacggccgctgaggaaggtagagcaccttcgtccggaaggtcgggattccgccgacgacctgctcgggcttctcgccccggagcgtgacggccccagactgatagacggcgagctgagcgatgcacttgagcaacgtcgtcttgcctggacggagcgacgcatcaggtcaggtcagcgggctggctagggcgagctttaggacgacaggagggcgagcgcaccggcacccgaacggcctcggatgatgacgacgtcgccttcctcaacgtcgaacgagacgttgctgaagatcgccgaccccgtgccgtcgtcgcggcgaatcgctaggccctggacagagagaagaggagccatcttcgttgccgacaaagagtgtgcttcagaaggagggtgctggtagctggacgtccggatggagggagcgggcagggtgctcgggctgagcgaatggcggcggcagccgatcgacatgcgacggactgcgtccgaccttgcactcgcgtgcgcccttttagagatcgccctccgacgacaagaagcaggttttccctgtccagtcctaaagttcacttgagcctagcatgtgaagcgggcgcatcatatcgtccgagaccagccgcagtcggccacggcactccgcccgggctcagatacgaaggcccccgctggcctcctcggacgagaaggcatacggtgccggtcgacgtcctgctgcaacgtttgcagaagctcgacgcgggttgccacttcaagttgcgatgcagcgtgctgcgtggcgaaagtcgaactcaaagatgcgctcgatcgatacggtcggatgcgggcaggcatcctcgacctatcgcctcgagtcggcgttttgggtcttgcgacggcagaaggagcttcggatgccttcagtcgaccgaacgcgggtcgtagtggttacgctcaagctgagggggacgaagggtagagaggggttcagcctgccgcgaagcttacacgtgccgagccgccgtcgcacgacaaggccccgaacaaggacggacctcctcgttgagctgctgctcgacaaagatgacctcgctcgtcttgatgacgagatggcaggcgtcgatgtcggcgacgataaattggtcttgcggggccagcagctcgttcttccataacaggatctgcttgaccgcctgcgaggcgagagcaggagcaggtagagatggcgtcagctccgcgagcgtagagcgaggcaagcgatctgcagactgacagggtcgcttcgaggtcgagccgcgttcgagagtcagaggggggtcagccgggtgacgagtgtggcacagagctcgggaggggcagaccagctgatgagcgtgcctgcgctcgacgaggcgaccgagcgagagattcaagcccgtcagcaacctcatgtgcgcagaggggagtgtctccgctgagcgcacctggcgtcgcgacgggcatctgtcctgctgcgtcggtcccggaggccaacggtcgtgggagttagagggttccggggggcccttggatgtcgtgctgagcttgctctttggctcgagtcgaccccgtcgtccctcttgccctccaaccacgaccgcctttctccccctgcaccttctactcgctcctagtcatggccgactcgctcgcttctgtcgccgaccagctcgcgggcacatcgctcaaccccgaggagccgacctcgagcctccccttgccgggcgactgccggcactggtcgttcgcgacggaatggtgcgacctcccctttcagccccgctgggcgacaagacgtgggcagaccgactgacctgggctcttgtcccctgatatgccagtgcgacggtcgagaacccaagtgtcgcgctcaaagaccagcacggctcgtcatcggtgcccatctatcagacggcaaccttcaagggcatggacggtgccttcgactacacccggtccggcaacccgacgcgctccttccttggtacagtcggagcttgggccctggctgacttgctcggccggataatcctcgctgacactcacctcaccccgctatcgcagagcaccatctcaagaagatctcgggcgccgcgaccgctcatgtcgtcaactcgggcatgaccgcgctcgacctcatcctccggctcgtcaagccaggagagacggtcctcgccggcgacgacatctacggcggcagcaatcggctgctcggctgggccggaaccgacggcggtctcgtgagcacccttctgcaagcgctctcgtgtccgcttgtgcgatgtcagacgctgacccttggcgctggcctgcgacccaggacgtccggcacgtggacacgaccgacctgaagcaggtcgccgcccagctcgtccctggcaggaacaacgtcacgatggtgctactcgagtcgccgacaaaccgtgggtccgagtctcctcatatgcgcctgacctcgcttgcgctgacgctgccttgctgcctcactcagcgcttctgcgaatcgccgacgtccgcggcatcctcgacctcgtccgcgctggtgcacctgtacgtgttctgcagcagctttcgactcgcctgcaaagctgacatccttcgcgctttcgtccgtaggatgcgctcgtcgtcctagacaacacgatgatgtcgccttacctcatgcgcccgctcgacatgggcgtcgatatcgtcagtcggccgagatcgggtctgcccgatgacactcagcgtctgaccttccacctcctgcaggcgtacgactctggaactaagtacctctcaggtcatcacgacctgatggccggtgcggtaacggcccggaccgaggaggttggcaagcggctcgcctggttcgtcaacgccatgggcaccggtctgccgccgtttgactgcttcctgttgctgcgaggacgtgagtcggccacgatagctcagatgagtcgagggtccgggctgacgtacctcttcgtccgcgcactcagtcaagacgcttccgctgcggatggaccgccagcaggcctcgtgcaacatcctcgcctcgtacctgcacacgctcggcttccctgttcactacccaggcctcaaaacggacccgggccacaagctccacttctcgcaggccaagggtgcgggcgccgtcatgtcgttcgagacgggcgacgtcgacctcagcggcaggattgtcgccggcacgagcattttcggcatctcggtcagcttcggcgccgtcaactcgctcatcagcatgccctgcctcatgaggtccgtcgagcagtcttctctttctgtcgggagggcgaagacagctgacgcgctttcccgctcaaactcgcaccagccatgcctcgatcccggcccacctccgcgccgagcgcggcctgcccgaacacctgatccgcctttgcatcggcatcgaagacgtccacgacctgatcgaggatctcgagagctccctcctcgcctcgggcgcgatcgtcgccagcacgtcgcccgccgaggcctctgcctccgacgacgactgggccatcacgcgcgcccgcggctttgagcgcgtcaagctcgccgaggtcaagccgccggcaggccaggaggacaagagcgagatctttgtctcggcgcccggaaaagtcatcctctttggcgagcatgcggtcgtgcacggtgtcgtgagtgagacgttcgagtagtcctttgccccccttcttgtagaccctgctttggtcctgcgttgtaccgttcagcaccctcatctcgctcccgtcatcccattcctatgcaatttggcctccctcgcttgcacccgaaacgcgacgcaagtgactgaagccgcctgttcttcttcccctcgcagactggcctcgctgcctctgtcgacttgcggtgcttctcggtcctgaagccaagcgtaccgactgcatcctcgtccaaggtcacgctctcgattccggaccttgagtcgacgcagacatgggacgtgtcgacgttgccttggaatctcgctccggcctggacgacgtcggcgcccgacagcctcaaccaggctctgctcggtcgctgcgaggagctcgcagaggcggcaggcggcgacaataggggccgcgtcagtgcggccgcattcttgtacctgctcgtcgtcctgagcaaaggcgttccctcgtgagtcgcctgacattcagcttctttgtcggcgcgcgctgacaccccctgccgttcatcttaggtctggcttccaattcgtcgcccgatcagcgctgccgatgggtgctggcctcggctcgtcagcggcctactcgacttgcctcgcgaccgccttcctccttcacttcaagcacatcacctccccggccctgccgccgccctcgacggagacgcacaagcacatctcgcaccgcggtcggcgggcgatcggccaggcccacatcgaggtcgtcgaccagtgggccttcctggccgagaaggtcatccacggcaacccgagcgggatcgacaatgccgtcagcgtccggggcggggccgtcgctttccggcgcaaggtcgagggcgttcaggagggcggcatggagggtatcaagtcgtgcgtctgaagccacgctcgaccggtgccagacgcccgagctgaccgacctgcacctgtgacagcttctcgtccgtccgatttctcatcactgactcccgggtaggacgcgacaccaagacgctcgtcgccggcgtcaacgcgcgcctcgttgccgagccggacgttatcaagccaattttgacggcgattcaagctatcgcagacgaggcccagcgatgcctcaaggacgtcgagatgccgcgggcagagatgattgagggtctcagcgtgcgttctttgtctacagccttcgccagcactctggaggctaacctcctccttgcaccactggcgatcgccgttacaggctctcatcaaggagaatcacgaccacctcgccgcgctcggcgtttcgcacccgtcgctcgaggagatcatcgccctgaccaaggcgtcgccgtacgagctgtcgacgaagctgactggcgcgggcggaggcggctgcgccgtcacgctccttcccgatggtccgtctccacctcctcatctccatcctcggcaacgcagcctctaactctttgcccctatgctcgctcgctgcagacatctcgaccgagacgcttgaagccctcaagacggcgctcagcgaggctggcttcgcgccgtatgtcaccgccgtcggtggctcgggcgtcggcatcctccacccggagcacaggacgggcgccagcttaaccgacctggcgcaggagatcctgagcacgggtgtcgacgcgcttgacagttgggcgctttcgcagggtcgctggggttttgcgtagacgagccgatagatggccagacaggcgcagtcgcagagatcgtgaaaggtcatgaaagaaagcgaggcagcatgcgggaggcagggaggcaggggaaaggggcaaggacgtccgctggctcagtagcccatctggtcgacccgggccaggtactgaaggaggatggggttgagagcgtcagcaaggcgaagcgaagcgaacggtatagaaggcggacgcacctcgtcgaccatcttgcgcgcaactgctcgctcgtcctcgtcgaggtcgtccatcgtcgacggaggaggccgccggccagcccgcttgcccctgcagaacagaccgccaacgacgtcggccagcgagcgcggctccgggaaaagcagcggctcgagccgggtccgaatctcagcctcgcgccgccggactcgctcggcgatctcagcatcgatcgagagggcgagcgcctgctcgagcgtcaagccggccggccgggacgagagtgactcgaaggccgcccggctgacggtgattgtttggctcggctgcgaggtgtaggctggcggcgcgctgtcgacgtaggccggaggcagaggagcagacgaggcgtccgagtccgaggagaccgaccggtcgcggcgttggcgctggctgcgcgaggatgaaggggccgggctgagggcgacgggcggcgactgaaggaggtgggcgagcgagcaggtcgaggacgagggcgagatttcgaagccgcgatccggagagcagtcggcgtgcgaggaagaggacgaggtggaggccatgtttgcttaagcggtggcggagggaagagggctggctagctggaggaggaggcgactcggtgggtggtgagaggagggaggaggcagccagcaacggcctgcttctcgaagcttctggctgcagggactgccttcgtgcccttactctgtcattcaggggaggagtacctgctcgacaggatcagtcggtgagcggttgagcgacatgtcgaaggagtcaggggggcgagtgagtgcttgagtgaagggcccggctcgctgcgcgcgagcctttccctccgagagaaagggggctggtggctgcctcgccctccctcctctctctccctctcgacgtcgaccgagctggcctgctcctcggagcaaggtgacagcctcgctgacctgcctcttcgaggcgatggtctcctgacgagcaagtagcagccccgggctcgccaccttcgctggccgttttggtccacccgctgcccgccaggccaaacacgagcgagcgcggacgctcaccggcggtgaccttcacgacgactcgaatgctagccgatgccgagccagctgatgagctggcctacctgttgagtcacccatggtgaaaggagaggagctcctcaggcactactcgcgcgctcgacctgcctgatggggtaagggcttgcccgaacgagccgtgctgccctgccacgcgggggcagacgaatgcgctggtgacgaacctccgtggagaccgagtggtagaagtctccatcgggcaagcctcgcccctcggccccgaccgactggctcgccctcgttcgacgggcgcggatccgtctggcgcatgcgcgcggccaacaggctccaccagcgctggcgacctcccaagggcgccggctggcctgtaggtgacagccagcagggcgctcatcgcggcccacgaggctctctctggagcggtcacagcagccaaggtcaccgacgagaaagaaggcaacaagccgctgacggcgccgaggacgggttggagggaggggtataagagcaggccggctgaagcttttgacgcccttcactttcatcccatcttacccagcccttccgatctacctcctcagcccattagcaaccacccagctccctcaatcgcagctatgatcgccatcgccatcgctgctctcgtccttcctggacttgcgctcgctgcccctgccccggccgcccgtcaaaccgaagtcggtacctccattcgctggcagggctcgtccaacgagtgcctgacggtcgagattgtcaacggcaacgccaacgtcgccaatggtacgcccctcgttacccggaactgcgcgggcgctgctgctagcgtccagaactgggtcagtttccgacccttctcgcctcatccttccgcccttctgttttggtgctcgctgctaacacctcttctactcttactctgtcctcgccctcagatcatcaaccgcggcgccggcaagatccgtctcgccaacagcaacttctgcctcgacgccagcatcaacccccgcaacaaccagggcatgaaggtgcgtctttcgctttcctgagtacctgcccctccccctctctggctgatccgtctcaaacgtctacaaacagctttggtcttgcctcgacgtacctcagcaaagctggtacctcactgacgacaaccgtggggcctttcatcgtcgagtcatgtcggtggcggtcgtactgacctctctttgtgccatgcaactcctcccaacagacatcgcagtcattggggacgaccagtgcctcgacaaggagaacggtgtgggcaaggtccagacgtacacgtgtcggtgttcgcttccccttttccttctctgctcgcttcctgctgacgctcacctccgtcttgctaacgccaggtgacggacagaactcgaaccagctatggatgatcgacggcaacactcctcccgtcgtcactcctcccgtcgtcacccctcctgttgtgaccccgcccacggccaccggcaagcagatcaagttccgcgacaccgaccttgtacgctcgccctccagcctgacatcccgccccagcgaaaggctgacgtcgctcttgccttcgcgcaactccacagtgcctgatggctaaccctcgacccatcacgggtgcctttgccaatggcgacatcgtctcggtcagcaactgcgctggggcggccgcggcagctcaaggttgggtgagttttcgtctcgacacacccaaactccctgcccataccctcttctgacatcatccctcttcgtcgattctagatcgtcaaccggggcgccggtcaggtccgcctcgcaggcaccgatttctgccttgacgccggctccagcaagtcgcggttccctttccctcttcaccctgccatcgtctgacctccacctactcctccttcctgcagaccctgccaacggtgttgagatgaagatctggcaatgctactcgaacctccctgctcagaactggtaccttaccgacgacaaccgttagtcgtcgtcgtttcgctcttgtgacgaacccaaggctaacccttccactgcgtcctcttctcgcaggcatcgccatcactggaggcaccgtctgccttgacaaggcttcgggatccgactccaaggtgcagacttggacgtgcggtgtgtgcttctcactaagctcgcctcgcatcgtcgcccactctgccctctgaagctgacgaactcttccacctcttatcgcaggcacgggtaactcgcagcaggtctggaacttctaattctgacagattcactctcacccaatcctctcagccttccctcctgagccccggtcactctagtcaaaccgtcttactgaacagtcacttttcttccccgttcccgtcggttgccctcctcagtgtatgctgctcctgcctcgaactctctcgcctgctctgctcgtagtcgtgttgatcatgctctgtctttgcatcccgaccgctcgcccgtctgccagcttgctcgtctatctgttgcgcatatcgcgctaacaccgcctgcttctgaccactcctcgaggactaaaccaactcggccatcgtacctcgttctcgcccagcttacgctagaacagcagatcgtcccggcctcctccgcgaggcctcggtgcgtcggcctggtactcctgctcgccctggtcgaatgcgccgagcgcaccgtacggatcgtcgctcgctgcaaccggtgccggtcgtcgcccgccaccctgctgcaaccggtggccgtcctcatcctgctctgggtcgtcgtcgtccatgaacgacgtcgaggaattggtccgctgtggaagcggcggcggagcggtgagcgaggaggcggtgccgttgctttgcggtggcggagcgggccgtggaggtggcgctgaggaggtcggaggaggcgcaggccgagcggcaaagccgcttgcgctctgcaggtggcgccgcgtgccagcattcatcgcaggcgagtcgggcaggtagcgcgccttggccgtgcggatgaacgtctgagggctcttgtggtagatactgctgagcgtgcccgtgtggaggaggagttggtcgagcatgccgcggtccatccggtcggtctcggtcgagatcggcggcttctccgacagaacgatatcttttgccgccgccgggtcggtcgagatcatccgccagtacatgaagccctgaagaaagaggggaggcggtcagaacgaggcccgccggcgaagcgagcagagagtaggacgcactcgatcgcgcagatccgggttgtcggcctcctcggtcgccatcttgagcacgcgcggaaggagctcctgcccagcgaccggccgcttgatgaagagcttgaccgttgcagtcagcagcgcgagttgtacctagagcaaaaggcgcggtcaggaaggggcgcggtcagcaagagtcacgaccagcgcatgttgcagccgtcgagcggacctcggtcggctcctccaggaacgtaaagacccagtcctcgagcaactcgtccgagttctcgatccgctcggcgtactggcccacgatccagatcatggcgctcttggcctcgggctcctcgaggacgtcgaggttctcgcagagcgtgccgatgatcgcctcgtactggttcggatagcgccggaagatgtctttgatgacgacgacggcctcctgggtgacgtaagtgatcttggtcgagatcagctgaaggagcacggtgatgcacttgtcggcggccgaggggatcttgatcgcgagccggccgatcgaccggaccgacttgcgcacaaagtcgacgtcgacctcgctcgcgtacctgaagggcgcgagatgacgagggccgcacgcagatgtcattaggctccgctgtcgactaacgcgcacccaggctgactcactcgcgcagctcctcgagcacctcggccgcattggcctcgcgcgcgagccggtacatgatctcgagcttggcgagcttgacgtagattggatcgttatacttgcaaaagaagactttgacctcgttctgaaggatcgccggccggcgctggatgatgagcagaatgttgcgcaaagcgacgtactggacctcggggccagacgagagcagagtgactgccggcgggtgagagcactggtggtcagcccggatgagcgcgcaaggtctgggctcgtcagacgcaccgagcggcggccccatcttgcgctcaagactcttgatcgtcggctcgtcggccatgtaattcatcaggtagaggatgaccttgacggtcgtcagaacgacggccgagttggcatgctggagtcggacggcgatccgctcggcgagcgactcggcatcgagcacgttctgcggcgtgaacgacaggagcgagtcgaggatgtagacctgcgaccacctgcgagtcggacgagagagtcagaacaaggcgaagagtgtcgggcaacttgcggacactcactcggagcactcgttgagcgcggcaacgagcttgccggcgaccgtcacgttgagccggagggcaatctcctcactgcgctcgctgatctcaacgagcgcagcgacagcgttggaaacgacggtcggattcgagtcggccagcagatcgcggagcgcgccgataaaatggggcgaccggtcgagcgtcgcccggcccggcggcgtcgagtagagcttggcgacagacagcgcggccgtcttgcgcacgtacgggtccgagtccttcaggccatgccgaagtgggtcgactacggccgagatgatggaaggcagcgggatcgaggtcatcgtccgcaaggaaagggcgcggacgagaggattgtgcgactcggagtcctgaacggagggcagggatcgacgagggatcagctcggctctcaaaagagctgctcgccaggcggatcgcgactacgagacgcacagcaagaaagtacgggatcgcgtgttgcgtatcctctggccgggaccggccgtagttgatgagaaagaggtagaccactggaggaaggcatcgtcgagcgtcacgtcaggtctccaggccgtcgctgcgcggaactgcgcgcgccttcgaggaggccggcaaggaagcctgagtggccgatcctcgcgagcctccgaagcgagaggacgcactctttttgatctcgagaacctgaatcggcatgcactggatgatgtctggaaagagcgccgacactgaggttggcacgaagagggaggcggcccgtcatcagcgcttccgcctgcgagaccagacgcgaggcaccggctcgatgcacgcaccgtcgttacccatcgtcatctgagtaagccggaggacatgaaaagcgcatggtcagccatgattgccctcgggcccacaggacctaccagccgcaaggagggccgagcaaggaagggctcggagggggcacaaggggctgcagcgagggagggacggacgttagcgacaatcttcttgaggacgatcttcttcttgccgaattgcttgtcgcccttcttgcctatgccgcctccgaggctggcatcggcctgctggagctcggtccggagctcttggatcttgccccgagctgaacgagcaggcgccaagcgaggaggcgcgggggggtcagcgcgtcggcgacctgcggcggtccctgtcgatccccttccgccgaagctcactcactgaagaacttggcatcctggcctgtgctgggtcccgacatatcggcgagcgatgtacgtcgagcggtagaggttgaacgatgggatggcggtcgagagtcgtttgaccttgagccctctctcgcgtcccatctcggctcgcgcggcggccttgttctctccgcagcgacagtcacctcacctgctgccctttccgaagctcgacgacatgcgcccagacgccgtctcgggttctggcagcgaacgtcggggacgatcggccctactcacggtcgggagcacgtcctttccggacctgattgccgctgccctcgcccgaccggcgctcgacgccctcgttgcggccggcttcgacgagctcctcctccagtacggcgagtcgacgctcccgctcgtctggactgcggccggttcgacgcccgagggcctcacagtgacatcatttgccttccgagacggcattgaggagctctacccaggggtagacctcgtaatctcgcacgccggtgcgtctgacttcgcagcaaggccagtcgtactgcgcgggctgaccaggagacctacgcatccaacggcggcccccttgacaggcgcagggtcgatcctgacatctctgagagcgggcaagacgctgatcactatcgtcaacggctcattcgccgacaatcaccagtctgagcttgccgacgcactcggcggccagggtcacctcctcgtcgcaacgcctgcgtgcgccccccccctgcctaccttgccacattccgatcctacaccgtctgacgcaccttcatccttacgcgcccatcaccgctagctcgctcgcagagacgatcgcatcgcttgccaccggcgccgaagccgctctgaagccgttcccgccggccgacccgaccgcttttctgcggatggtcgacgaggaggccgggtacatctgaggccgtcccggtccaacatctacgacgatcgcccgcccgtgcacgcgtcggtctcagtgcgccaagagccgggggtttcgtcagatggggttcatgttcgcatgccaggccgcctccgaggcgccggtctcacacctcctccatgtcctcgtcgctcgcgtcgtcgtcatcgtcgtcgtcgtcctcgccgtcgtcaccgccgacctcgcccttgacggcaccggcctcggccttgacgccgctgctcgagccggcagcctgctgctgctgggccggcgtcttgtagatctccatgagcgtccaacacccgacgtacggccctcgcttgacgaggacgccaatctcgccgagaacctccttgagataggcctcgggctgctgggtccgctgcttgagcgtcttgagccgccagtacgtgtgctcggcaaagagcgggaagaggagatcgagcagctcgttgcgcggcagccggtgcgccttgtcgaggttcttcggcttggcctcctgcgcggggtaaacggcgaagcaagaggtcagcccaagtgctgcaggcacaatgcgcagagcgatcacgcacgaagccgccgaatcggcccttgcccttggccccggccgcagatgtcgaggcggcgttgccgacaaagccgctcgccatctgggcgaccttgcccgcgccgaggccctcctcgtcgagccgcatcatcgtccgcttgggcttgtcagcccgcgcctgtcgatctcgcagcgacttggagtaggtcgcagacaggcgtggccgcagcgaggccgtgtggtggatggctgagtgcagcttggggttcactgcgcacgcacgtcggccgggccaggggcaaggaggtcagcagcaggctctcccggaggagcattgcaagccgagagggagaacacgcacgacgctgccgggcgtctcgcctcgtgtccgtcatgaggtagccggtgctcctcctgccgccctcgtcggccgtcggctcgggcacgatcgtaaggtcgtactcggtgacgaggtcggccgtgtcgtactctgcttcgacggccgacggaagaataagcgatatccgcggcgccgtctctcccggctgcctggagacgagcgaggaggatagagacaagccagagggggaacgtcagcgggcctcgagtacggatcacgagggggccgggtcggggacgcactgctcatagacgcgcatcgtcgcgagatgcttgcccttctcctcgacctgcgcccagcgctcctgaagaaacttgggcacctgcaaagacatcgtacaggtcgtcaggatacgacaggagggcttcccggggagggccgaccactcgcagcgcgctcctccgagttgcgaagaccgcaccttgacgagccagaccttgcggccatcaaagccgccgctgacggcgaggacctcgtccggccggccggcctcctcggccgctgtcgccgcctgggccgaggtcgagggaccgtcgaggtcgaacgggatgtcgggctcgtccatggccggaggagttggggtgggagagaggcacgaagggcgagccggcaggcggccgaagtccaaagggcggcggcgcgtgcacgagctcacctgccagctgactcccatcccgttcaagagagccgctctctctctcgctcgcttccgtagaacgttctccaccccgcctgtcagccttcgacgagccctcttctcgtctgaagccgatggcacgtcgttccgagcgaagcgccgctgccgctgctgctgctgctgctgccgccgtctctgcctctgaagccgcggccgctgctgccgccgtcgccgagccggcgcctgtcttctgcctttgccgtcagccagacgacggcatccggcccatgatcgcgtgcgagggtggatgcgaggactggtgggccccttcctgctgctgcctgaggctagcgacccttgagcacgagccaacgactgacgaggtagcgagggccttgccggcaggttccacgccacgacgtgcgtcccgggcttgaatgacgtgaactacgagcagatcggtacggccctttctcgcagctctcgcccgctcgacgtcaagctgactggacctgctcccaacagacgacttcatctgccccaactgcgaggcagcgaccggccgcaagacgacctgtgcgtcccttcctccttctcgccctcgccctttcttttttttttcccgctcgccccgggcggctggcctcggcgtgcggtggccttcgtcgtcgccggtgccgacgccaaagggcaaacgtccatctgccttgaccggcgacctgagcccagagcatcctgactcatacgaaacaacgctgacatgaccgcttcttgtcgctggatcagggctcgaggatggctcgccctcgatggccggcaacccgagtgcctttgcgctcgacccgtccctcatggaccagctcgacccgaccctcctcgtcggcgctggccagccaggagacctcgagcacgacgtcgacatgacggcagcttacaatccgtcggccttcatgccgcttccggcgggccctgggccctccgacccgcttcatgaagctgctccggaaggcgtctcgccctcggcgctcgtcagcccgccggtcggcgagcgatcgctgaatggcatcgacacgggctcgctctccaacggccctcctccgccaacctcctcccggaagccgtcagcgtcagcagcggcccgactcgaggacgacgataatgccgcttacgccgaggccgacgacggcctcttgagcaaggatgctgagccgccgtcgtcggccatccggctaggctccaagcccacgccgaaacgcaaggagtccagcggaggaggagtatcgcccggtatggcggccaaggagcgggagcggctgctcgccaagacgcgcgagcagtgccgggagagcatccggacagtcgtcgtgcccttgctcggcgaggagcatgcgccaacatttgcgcacgagctcgaggagctcgtctggacggccgaagacggcggcagcgagaagggccggaagaagtacctgtgcgcgccggtctgtcaccttcagcgtcgtctatcctctgctaacgcgatcgccaccctcgccatccagcgaccgcatgcgtagtctccgcttcaatgtttccaagatcgaccgcaaggttctccgtgaaggtatcaaggacggctccatcacagccgagaggctcagcaagatcacgacggccgagctgtgtgtctacgtcatcctttcggccgcatcggctgagcagcgtgctgaacaactccgctctgcttctcttctctccagggccaacccggcgctccaggaccagatgaagtctgcgcacgaggaggctatccgcgagcgcgtcatgactgccgagctgtctgggccgatgctgtcaaactctcataagggcctatccgagctcacggatgctcgggtcgaggcgcagcggctggaagcccgtgagcgggcgcttggcgacgaggagcgccggcgacggaagcgggagcgcgagtgggacgagggtacaggtcgtccggccgggccggcgcagggaggcgtgaccgacggagggcccaaggagaagcgccgcaagtcgagcgatgtcgctggaagtgaggaggggagccgttcgccagagcaggcacgacagatcaaaggcgactcgcccactgcgatcctggccaaggctgcagaggcagctgctgctagtcgccctgctccgccgacgcaccgcttctcgctcgacgccgtctgggctgccggcgagggcttggctgaggcctctacgacgccgccgggctcgccgcaccgctcgggtgccgacgacgcactcaacgagtttctctcggaagacgtctttgacaagccgtcggccggcgttgagcggccgcacgccgacgagcgcgagatgtcgcccttccaagaggctgcctgcggcgacgacgacggctttggcttcgactttttcacggacgagcctgacggctctgcgtcgaccgagaagatggccggtgagatggcaggccagccggccgcgtcaaatgagcaagctcaggcgccagaggaggtcgtcccggccagtccgatcgcatactcggagactgcgcagctcggcggcgagaagggcctccaggcgctcgagacggtttggcacggcgaggtgcgtctcactcgtcgaggggctactttcaactcagagaccaccactgacagctctccctatcagatcagcaaccccgactcgcctcagccgggccccgtcaccgcacggcaagttgccggtcccgccgtaccggcgtccttctggccgacgctcctgccttcgaacacgctcggcttcgtcggccgcgtccgcacgcccaactcgcgcaagttcctccatcaggcacagctcagcccgagcaaagacgtcattgttgtcatgctcgagggcgtcggcgccgagggcgagaaggctgtccagggtcacatgggcttccttcttgagcgagagtgcgtccgttgccccgctctgctacccgaggtcctgctgaccgaccgtcgtctctccctagacgcgacgccctcattcaaccctatggcgcagcggacgccctgcctctcggcgcggcacgcgacatgtatatgctcgtcttgcgccagaccgacgagctgccagacttcctcgacggcctggagtcgtccaaggtccccgagctgcctaaagaccggacgcgcgactacctgcttggcgtcttcatccggccaaagctcgccccttcggccatggcgccggcgtcggctacgtcgctcgcagtcccagacctctcaacgccagcgagcaatctccactcgcctgcgccggccgctctttccggtcactcgcctataccacctgcgactggagtatgtaaaccgtacagcgtcccgtacgagtacaagccgcccgatgcgactccggtcgcctcaagccctctcgccccgccccagaatgcgacgccgatggggcagaggccagccgctgcctactctccgctggccggaccggcgtcggcaccgccgctagctgtcccagacgcatcctcgattgccagccttcttgccactcttcaaggcactctgcctcccgtcgtcgctgcctccccaggtcctccggccgccggcttcagcccgcccgactttggctcgcactcgccgtacgctgctgccgcgccgccggcaccggcttttggccacggccggtcaccagcaagaccccctgggtggggcggacccggacatacgtcgccgccgccaccgccagcggcctacggccagtcgcccaacgcctacgcccgcagcggcctctacaacaacggccacaacgccggcggctactctccgcaaggctaccctcagcacggctacccccagcctgctccgcagccgccggtcggcggaggctggcagaacggctaccatcaccagcaaggcccgccgccgcggccaggttccggctacggcgctcctccgcaccatcccggtggcggctgggccaaagatgagcctccgcacgctgccgccttccgagacggctttgccggccgtggcggcgcctacccgccccgaggcggcggccactttggcggaggaggaggcccgccgccagtcgctccgcccgctcctggccagccgagggacagcggctggcacggccgagggcgcggccggggtggctactaaagcctcccctgccctccgtcccgctcgccatctcttcatcctcgccctccacgccgactgcccctcggctttgcggcggtcatctctttttaccctcattttcgatttcgcacatccctcgcttccatcgtcacacccgcatctgcacctttctcagcagcctgtagaaacccatgtagccttagcgtcgactctctgcgctcattgctcagcaagacgacgcgagcaacgctggctctggcgaaggtagggctgcgcaagcgaacgctggcgtgcatgccgtcgacgcactctgtcgatgcacgacgtagtgaaaaagcaggaatgctgccccgctccgatcccctctcaccccccttgcaccataggagtctctccttcgatgtacctcccgcgtgtccgacccctttgtgactttcaatctatcgtaataacttctccgcgtagcccctcggtgaaggcgtgatggcaaggtgccgcttgggtgaagcacctggcgatcttcctcgaccagccctcgggcctcggcgacgttgggaagccgagcgcgaggagtcgtccaacggccgtcctcgccgggccgattttgagagaggaggagaaggagatcgtccgtcgacggccgacgtcgcacgcgagacgcagaccttggacggagcggcccggccggatgagcccaccgcaaggcaagcagaggattcctctggccgctgacgacatgagcgtcagggtcagcgccacctacttcggtcagtctgcctttgggtagcgtcgaggtcgtcagcgacctgcctgcttattgctcgcaggtcaagggcgggcagtcgtcgctctacctccttcgtcgctggcatctcgatggcggcactgcgcagtgagttgcccccgcctccgttttctaagcgcggctgcagcctttcagtcgacccgaccgaatcgcccttcttgcgccaccatccctcccatccacgctcgacggtcgtgccggtccggtgaatctggcggtcgctcgacgcttcgtcgtctgttcgacgagtgaagagtccagagaggaagcggcctggggcaaacctttggcgcatgttctctccgataaagctctctcagcgtccggccaagcctgttgcatgcgcgaagggggcaggcagcctgcgacgcgtgcgtccgtccgtcgcggcatcgcgggaagtcggccgccgtcgcgaccatctgcgctcgtcgtcgtcaacaggcggtgagaagaggcggttgctcgggggcgcctgccgtgatacaacttctcgcctcttttgcgtgccgacagtcagcgagtccttctacaaactcgtcaatttgcgctcctaccgttgtcagcccggcaggacgcaaccctgcaggccgtcgccgccgctgcgttcctgggtgaaggggacgcgtcaaaggggtgaggggcaatttacagccgggggacgcgaggcggtgggtgcggggtccggccggccccgtcgcgcgctgattcgaatggaccaagccagccgccctcgctggctgatcattccgccgccacgtcggacagaagacagggagcggaagttgcaagaggtcgagaaaggccagagctgtgcggccagaccggacgctactgcgaacctccatcctctctctctctctctctctctctctctctctctcacccgacagcatctcagcctgagcaccttttctcctcccggcccgaccgaccagcaccgatttcctccctctgctcgctcgcctcacccccgcccggcgcgtcaagccacgagcgcccgccctttacccacgcgcgcacgccatcccttccgtcgacgaacgaccaacctcgcccgctccttgcccctccaggccgaccgtaccgaggtacgtcgctcctcctcttgctggccgagcttctgcagagccgaggcccggtcggtggtcggaagcgcctcttgagtacccagaatccggggcgctggcctgaccgaacctctcgggcgccgtgtcaagccgcccagcgagagcccgcccgaccgaccgaccgcgtagcgccgcccctttcggtgcgtttgccagcctctcgtcccgctcccatcgctcctcgacgaccatcctctccgtttgccctttgcactcgacccgacccgcgccgcctcccctctcctttcccacacctttcctcttctggcctttgcgtgtcgccgagctcggcctcgccgctgcccggccatgagcctccttccggcggtcagaccgccgcccctcgccctgccctcgtctggtctccgacgcctcttctgagctgacctcgtctcgccttttgccccatcttctttcttctgcgtgtgccgcgcggtcaacagctcgtgcccctgccggcttccccgccttcgatccccgcttcagatctccccagccccgccgagccttcgatcccgaccgcgacgacctcgtcctcctcgtccaacatgccctcgaccccaccgtcttcgcagaagacgcagagcggcaagacgacgccgttcctcggctcgcccgcctcgagccgcaaggttgacccgccggtcgctggcgtccagcagcagcagcagcagcagcagcctcccgccgactcgtttggcggcgactggtcggtaagtgggctcggcgcccagtcatgaccgcccttgccctctgtgacgcgagctgagcgcctactttgtcactgctcgatctcttctccgcctctgtcaggtctggggctcgaccttgcctcaggtcgactttaagccggtgcgccttctcttgcccgctcgcatacccggacgtcctgcaaggcttgccagcgctgacgaccggctttgcgtccctcacctctgtctacagcgagacctggccatcacctcgtcgtcgcaggatcccggccgctcgaccggcagcacccgggccagcaccggccgcttcgacccgaacgcgccgcccttcctctacagcccgacctacctgcccaaccagccgaaccaggacggcaccggcggtcaggcgtttgcgccctacgtaatgcaggccccgatgggcgacagttacaatccgtacgaacccggcaccgacggcccgacgtcgccctacagttcggcggcgacttcgtttggcgcgctcccgcaaagccccgtcatgccgctcggccagatggcttacagctcgtttgacggcagcaatcctggctactggatgatgggcagccctgcggcttcagcggcggcactccctggcggaccagagtacaacgccgctggcggccagcgccaggtgaggtctcatcgggcgatccaaccgttccggagcatcctgtgctgacgcactgccccgcctctctcttctccagtctcgcgacggcagcattcaattcgctcgtggctatccggatccgcctccgttcagctctgggtacggagcgcagccgcagtacggcgtcacgccgaccggccaggcctctggccctcgctcgccctcgtttgccttcggccagcagcgccggctctcgcactctggctggccgcagttcaacaacggcggtgccggcgggcactatccggctggcgggcggcgcaaccactcgctcggcgcacgcgccgggtatcgaatgaacggccagcagcagcccggcggtggctttggcggcttccagcccggcaacggcggtggccacctcggcctcaagcgcagctcggccgccggcggctttgcgcccgtcatccggagcgagacgctcgacaacttccggagcgacaagagccggctctgggagctgtccgagatcaagggccatgtcgtcgagtttaccgccgaccagttcgcgagccgctggctgcagcagaagctcgagtcggcgaccgaggaggagcgccagtggatctttgacgaggttctccctgcctcgttcgccatccagaccgatggtgcgtcaatgctttcgggtcgtgccgagtgagcgactccgcagcagcaagctgatccgccctctcgcccctggtccgcgtccaaaagtcttcggcaactactgcatccagaagctctttgacttcggcacgcctgagcagcgcatcgcgctcgccaagacgatggagggctttgtcctcccactcagcctgtcgacatacggctgccggtcgatccagaaggcgctcgaggtcgtcacgagcgagcagcgcaataccctcgtcctcgagctcaaggacaacatcatggactgcgtgaagtcgtccaacgccaaccacgtcatccagcggatcgtcgccctgcccgagcccgggctcgactttgtcgccgcttttactggccgggtctttgagctgtcgacccacccctacggctgccgcgtcctccagcggtgctttgagttcctgcccgaggagaagatccggccgctcctcaccgaaatgcacacccagacgcggcggctcgtgctcgaccagtttggcaactatggtctatcgtttcactcggcgtcgccatacgcgcacatctcgcaaagctgacgccttccgttctccgcctcagtcatccaattcgtcatcgagaagggcctgcccgaggaccggacgcgaatcatcggcgagatgaagacgcagatcttccagagtgcgtcccgagacgcgcgcgagcttggcgaccgattggtttctgacgcctctgctctcatctcgcagtggcccggcacaagtttgcctcaaacgtctgcgagaaggcgctcgtctgcgcgcctcgggaggagcgcgagatgctcatcgacgagctcctcatcaagcccgagggctcgatcgcgcttctcatgaaggaccaatttggcaactacgtcctgttcgttctcctttcgccggctcgaggctgccggcgatgtccgccgctgaccccgtcttgcgacccgcagtcagcgctcgctccgcgtctccgagggcgcccagaacgaggcgctcaaggcccgcgtccggccccatcttgagcagatgcggtcgagcgccagtcagccccactcaaagcatctcgcctccagtacgctctcccgcctacccttccgcatcgtctccgcgattgactgtggaatttgtcgcgctcctccagtcgagcgtctgcttgccgacgagcccgctgttgtcgaggagacctcgcctgcggccgaggctccgacctcgatcgtccctcccgtcgtcgccgacctcgccgccgtcgccagcgccacctcggccccctcatcggcgccaatgtcccgtgcgggctcggcagcttcgctcccgccgtcgctcgcaccgtcgctctcgtcgggcgcctcatcgcccgtcccgacgccgtcgcagtcgtcggagcagcacgcgctcggcctcgacggccagacaaagaactagcatgggccacctgcgccctcctcccccacacccacctcctcttcgaccctctttcactctctcctctcgctgcatgttctcacgacaccacgccttcccaatcaacaatccggtcaccccctcgtctcggtcgacggtgtcgcggcctgcttgctcgttcggtcgcgtcctggctcctctcaaaagcttcgctcgcatccgcacccgaaaatctttcgtcgctcatctcactgttctctcgcaaagtcgactcccttttcccctgcaccccctccttttgccctcaacacctccactcgctcgtccgccctccgcaaaaccccttgccagcgagacggccgcccggccgcacctccctctaatcccaaccacccagctctacatgcatgtcttccgtccttcttctgtttccatgcgtcatgccggcgacgtgctgctcgaaaactgagggcaatgcttggcaaatgtatgacctggaggagattgtcggctgcgctgccaccgctcgcgcttcggctcgcagcttcacgaaactcgccttgctcccgccattctcagcccgccttgctcgccacctgccttaacatcgtcgagaaagccctcacgccccgacgtccatgctcccctcaacgctcggtacttacctcaagcctcgtcagcggaccaactcgtacccgtcaaccatggcctcgagctcgagctcgtcaaccctcttcccgcctccgctgccgccgcctggaacaccgatgggctcgcccgtcctctcaccagcgggcacgcccggcggctcgtcctctccgcggctctcggtccgccgcagcctgagcggcctcacccgcctgttctcggccggagcgagtgcgagcgacgtcgtcgtcgacggctcggtcggctcctgtctggctgcgcctccggccgtcccttcgttcgacgacggcagccgcctctcagccggcggcctccagccctcactgatggcagccgacgctagcggcagctcgtctggccgccagacaccatcaggcgagccgtggctcgtcatgctgcccaagcagactgctcagtcaacccggcaggggcacgcgcgcagcggcgtcggcagcgacaagcccgccccaggctcggccagcacctcttcgagcgcgggtctcgtttcagtcaagaagctcagagtagcaggtcgtctgctcgaggagctcgagaccgaggccaacgcagcggaccttgacgaggactacattggtgcgacgccctgctcgaaagccttgcacgcgcgcgggctgccggctgccccaactgacacgtgcttgccgcccgcccttgccgcagcgcacctgctcacgctctctttgacgtcggccctcgcctcagtccctcccgaggtccaaggccgggtctttgcccagtcgcctcagctcagtctcctgccgcaacctggcttccggttcgaatacctcacctcggacgaccagccgtggaaagagcgcgcggccgacggtctcggcaagggcctcgctgccctctgggtcagcggtatcccggtgtgtcctcatttggctcttcaaatcggctctggccgttggctgaaataacgacacatcttcgttggcagctgctcgtgcactttcttaccctgctggcgacggtcgccggcatcattcaggccgtgctcgtccgactgcgggtcaaggagatcctcgagtcctacctgctcgcgtttatcaactttggcgcgtcctctgcactgccagtcgcagtatgctgtgctgacttttcctgatgtcctatagttgcgacgagctctgcactcgggcacgtccgtaacctcgcctcggacacgacatgggtgctcttcgaaagtgcccggcgggccctcgccggcgtcctcctgcaccagaagtcgaactccggcccatctgagcggactagtaaggctggaggtcgcagcggaggatggggcgggtgaacctccctgccttacttctcgtctccaccttccacagaccgcctcctcctttctcgatcctcgatctcgtcccatgtcttttcctcttgaccatgtcctcccatcagttcctgacatctccttggactctcaactccttgtgatagctctctgtagaacgaaacctcatgcgcatcctttcttcacagctcgggtcgcgtgaccgaccgcctcttagctcagtaagcgcactcggtctggctcgcacactcgagcaatcgcagcaaccgaatttccatctatcggagctcagacatcatcatgccctggcgctcactccgctggtgaccttcagcgccgtctcgactttggctgcggatctgacgccagagtatccgccaccagctctcgtccgagtcggcgttaacggtcgacgtgatgtagtagagcggcacgccgaggccgatgaaggctaagagacaccgagggtcgcggtcagctccgaaagaatgccaaagaaatagagcagggaagggccgcaccaaatgcagccagtgcctcggtcggagcggcaacgacgggcatgatgaggaggaagagggcgacaacgcagaactacggtcaagacaaatgcacaaggtcagcatcaaagccgggccgccacgggagatgagacagagctgaccgtgatcggggtgccgagccacgtctgatacgggcgctcgagatgaggctccttgaccctgaggatcaagaggccgaggactgcatatagcgcagataagtcagctctgccagtgggcagccgtcgtcagggtagacaagacgtaccagtgaggaagtaaaatagccagtctgcaggcaccgagcaacagcgtcagctcagatcgagcgcgaaagagggagagaggcccgcactggcgaccgagaagaagttgataagtgagcggaagcctccgccgagcaggatgtacgcgatcgtcaaggtcgcttgaagcactgcgagttgagcaggggacatatcggtcagatgacttggcccccgcacccacagctcttcgacagacgtacgcatcgcccagccagcccggccgcccgaccagagctcgccaaagatgcgcggcagccagccctcgcgcccagcttgaacgacaagcattgacgtagtgatagtcgagccgttcagggcgccaaagcacgaggtcgcgacgaggatcgagaagacgagggcgccggccgtgccgagggtcgctgcgccaaagtcctgcagtcggtcgtataaaaagcgaatatgagcttggaccgggacgaaggcacagcaaatgaaggacggacaagagcgaccgtgttgctggctccgacaattgcacgcggaaggacgagaaagtacgcgaggttgacggccgtgaagagggtgacaacgatggccatcgacgagtggacgactcgagggaggtcacgcgagacgttcttcatctcgccggcgacgtactgcgtcgcgagtagcggttcaagagaaagtcagctacaggggccggtcggatggcagaagagacatatgactgacgttggtttgatcctgtcacgcataagcaagacacggagacgagtcagcacagcgtcaaaagccggaagagggagggatcgactgacccaaccgtcaaaggcccacaggccggcatagattgcaatcgcgaaccgcccgatctcgccggtggtcccgtcccagaagccggcgcccgagacggacgaagcgctagtgaggttgcccaggccgtgcgagagcgcgtagatgaaggcaagcacgaggatgaagacaagcgagagcatctgccgagtcaggggagcaagagcagggagcagatgagtacggaacgcaaagagtcgtgcgccaggtctaggcagctaggcagcgcaccttgatggtcgtcagaccgacttggacgtgggcgccggcgcgggcgttagcgaggtttatgccggtgacgacgaggacgactgcgtcagggagcagcaggtatgtcagctgagggcaatctgcagcgaaaggaagcgcagaacacgcacttaggcagccgagcaacttgaacgtccattcgggcgcctctcccggtacagatgctgacccctcggcagtctccgcagaaactgacgacgagtagatgagccgcatgacgtactcgccaaagatcaatgcgatgatggccgcgctgccgggcttgagcagcgtgactgcggtccaggagaagaggtaggcgacgagcgggccgtacgcatctgcggacgagcgactgcaggtcaagtgctgcgcaacgaacccgaccagcgcgcacagactgacagttgaggtaggcctggcttccgccgttgactggaatggcagcgccgagctcgacatagctgctggcgccgctccaggcgagcaggccagaggcgacccagacgaggagcgctgcgccgggcgagccggttgaggagaggagcacgccaggcgacgagaagatgccacttcctgtcgagcacggctcaagcagcgccggggtcagtcaccggtcgcatgtcacgagcaatgcgcctcgcttgactggacgcaccaatctggaggccgacgacgagtgcgacgcctgcccagtcggtgcgagacggaagcaggagtgataagatcagcatgaaaggcgcaggtcatgcggtgctccccgtcgtatccacagccttcttgagggcactgtacggacccagcgaggctaacggttgcagagatgcaccccggtcgagccgacgagatcgtcaaaggggagagaggttgggcgccgcacgcaccgttgacgacgccgagctttctgccggacgcctttacggaccctcccaggccgtcgaggttgtcgctaagggtcaacggaatgcccaggccggtcaagcccggaatcgcaaacgccgagagcgtgtcctggcggcctcgactcgaggacgacagctcgagctgggtcaggtcgtcgtcgtcgtccgagccggagccgccggagccatcgagcgactggctcttgctgcgactagcgttgctcgaccgacgggagctcgtcgatgacctcgcaggcccgaccggaaggggcgcgtaggagcttgccatgcgtctggacgagcgtttggacgaagatggtcggcgggagagagcgacgcgtccccgacgcggtctctcgtcggcttcagcccatctccaagttgccctgaacgcccacccgtccttctccagccagatcgacacccttcaagcaggaccatccgacggcaaactcctagcccgccatgacctctgtcccccggggatcgaccgacctcgagtcggcgcctctcctcatcaacgaggacgccccgcccggtcctgtgcccgcgacgtcgtcggcgtcagccggcgagcggcggcgcaccggcttcctcgcccagctgaccgacccccagagggagctcactgccgtcgagaagctgctgttcggcattgcgttcgctgtgagtgctttctctcctgtcgacgaccgctctcgaggcgcagacaaggcgtccgacggtcgtctggtcaagccctcgtttgcgcggcctgctccggcgcaggccgaaccccctccgagtctccacctcctgcatcgttcatctcgcgggacctaggcatcgactgacctcgccgcccggtctcgccctcctgtagttcctcattgtcgccgccacattcattggcctgttcgcggccgagcggcacaagacgcgagcgccgccatcgcagccggccccctacccgacccccacgtggtcctccgccggcaggccgacctcaactgtcaccgcgtccgtctcgtcgtccttctcagcccctgttcctacctcgacctcctccgtctgcctcacgcccgcctgcgtccagctctcggcctcgatcctcggctcgctcgacacgacggtcgatccatgcgaggacttctaccgctacgccaccggcggctggacgaagcagaaccccctgcccaaggacaagggtcgttacggctcgttcaaccagctcgccaaggccaacgaggtccgtctctcgtgcttcttgatgacaaggactgaagctgactcgatggtccctccctcgcgcagcgcatccttgaggacgtcctctcgtctcccctgcccgacctgcccaaggacccaagcgaccaggacctggccggccgcgacaacctcgtcaagctgaaggccgagttcggctcgtgcatgaacgtctcgtggctcgacacgctcggcgcgcagccactcgtcccgctgctcagggacgtccagcggctcttcccggccgactttccgacgccgaaggaggaggccgaattgagcgagaacgtcctcgcctccgtcgagacggccgccgagagcgccgtcgagcgcgttaaggccgccctcgcgctcctccgcaccgaccgctcgtcgcctgcggccagcgccttcaaggccctggacgaggagcttatcggcaccgaagacgtcgacgccgagatggccggccggaagggctcgcgcttccgcaaggagctgacggacgcgctcgccttcgtccactcgatcggcgtcgacgctgtcttctcgttcgacctcgtgcgtgctctctgttgccgcgtcccgttcgcttgctcggcgctgaccgactctctttgcttctgcgcaggagggcgacgctgccatcgagcctcagcgccagatcctctggttttcacaggacggcctcggtcttccgtccaaggtgcgcatcgtcgacccgcttcgccggcagcgccctctgttgactgcgccgtcttcctttcctgtctccgcaggagtactacgaggagaagtcggtgacaaaggtttacgagacggtcctcgctgatgtcctcgaggaggtcttcaagctcacgcacggcggcaaggcggtcgccggcgacggagacgacgcacaggtccagtgggagtggccgcacctgccctggaacccggcgccggcgccagacgacggcagcaagaagcaccacaagcccttatcagctcgggcactcgccaagcaggctgccgcctcggtcctcgcctttgagcaccagctcgccaaggtccaggccgaccccgaggacctcccggacccgagttacagctacaacccgacctcgtttgccaagctcgcaaaacggctgccgatcaacctggcggcctacgtcagctcgtttgcgccgcgcaacttcccagagaaggtgatcgtcacctcgcccgactacctcaaggcgatgacgaggatcgtcgagcgggaggaggactacgtcctgcaaaggtgcggcctcgtcaatcggtgctcgtctgcgctgcactgacgcccagctcttgtcctgcccatcagctacctactcgctcgggtcgcgctcaagtactcccgcaacctcggcgacaccaagattcggcagagcgccgagcgcctgacgacgctcctgaccggcgtcaaggcccagcccgaccggaccgattgtacgtcgagtggctcaagagacgtcgctcagccgtcagctgacgcctgcgtcctcgcttacccagtctgcgttcagcagacgcgcaagacgctcgaacacctcgccggcgccgaatttgtcgcccgcgcttttggcggctcgtcgaaggcatcgggcgaggctatggtcaacagcctgctcgccgccttccgcgagacgctcggccacctgtcgtggatggacaaggagtcggccaaggctgctcggcgcaaggccgacaacgtcatcgccaaggtaggctatccgctctaccccaacacgacgagtcccgtcgcactccggtcctactacggccgccaggcggtcatcgacgacttcctcgccaacgccgtcgccggcaaccaaatggagctccagcgggcctggcagcaacaactgggcaacctcagggaccgcaattcgtggctaatggccgcggatgaagtcaatgcctacgcaaacccgcccgattcggaaatcgtattccctgcgggcattctccaacccccgttcttctctgcttcctggccggccgagctcaactacggagcaatgggtgctgtcgcgggtgagtcgcgtctctggtgcaggagcgaacgacggacgacgctgacccttttttggttttacccatctgcagcgcacgagatcggccatctgtacgacgcctcgggctcgcagtacgactacgaaggccgcttcaggcaatggtggtcaaacgagacggtcgccgctttccaggagaagaccaagtgcatcgagaagcaatactccaagtcggtccccctctccgtctttctgttgcttcgctcgccctgacctgacttctgcgcccgctcgctcccaggttctacgtgattgggccaaacagcgagcgcgtctacgtcaatggtaagctgacaagcggcgagaacgcgggagactttggactccgtgtcgcctggaaggcgtggaaggattcgctcgcggccgagggccacggccagaagaagctcaagctgcccggcctcgccgagtactctgacgagcagctcttcttcctcgcctttggccggatctgggcgagcacctcgacgcctgcggcggccaaggtccgtctctgctgcctgccagctcggcttacttctcatcgacgggacccggctgacctccctcctcttcccccgcatccatccctttccgcaggccggcgtcctgaccgacccgcactcgccgaaccagttccgggtcgaaggcacgctccgcaactttgagacgtttgcctcggtttggcagtgtaaggccggcagccgcatgaacccacctgccgaggagcgctgcgacctctggtagaggcgatctgatcgacttgcctggaccgtgaaatgaacatgaccccatgccctcgcggcagggcgctcttgacctgctctcgtctgcgactgctgttggatgcctcctttatgctcgtcctaggctctgagctgtcctgtcgtcgagagcgtcgtgtctgagctgtgatgcccgagtctcacgtgcacccccttcgcttcccctcttgcgcgtacgtctcgccggcgcagcggacccggcgagaggcaggtgctggcttccaacccgagcaacgagcaacacccaccgacccgacttatccgtctctatctccttccgtccgctttcgaacgcgtctccgtcgtcctcgcagccgcctgctaccgctgccgccaatgatggcgccgtcgcccatgcggccggtcgatgctgccgccgcccaacctccgccagccggcggcggttcagcagctcggtttcaaccccctctgtccagatcagcttcaagcggcgactactttggtcttacaccgtccagagcagtggcgcggacgccgaccggcgccagcagtggcctgagcggaggaggacaagcgagccggctactctggcgaggcgcgttcggcctggccgacgggagcgcgctcgatggtccgtcgtcttcctctcggcaggtgttgggcccgcactcctttcgctgacagcacactcgatgtcatcttgcttgtgctcaaggactcgccttcgtctctcaccttgcctttcctggcgctgccggaggtgtgcggacagggggcacctccccggctgggagcggcggcttcggcatcccggccgcagcagccaccttcaacccattctcgccctcgttcgcccggagccagggacaggagctgcaagaggcatcgccgacggcctcggccctgccaagccaggacccggatcttggtctctcgctcgcgcttgagagcctccgtggtcgggcggccgtccactttcgcggtcgggtcgccctgaacgcttcgcccgagactatcgcggccggacggcccggcccactggttgagggcaacggcggggtcaggctgtacgtacagtggactcgctcgataaagagcaacgtcgactggccagagcactgatcgtcatctggcggcggcagctacgtcgacccgacatgcccggcgctctatgccttcctctaccgtcagctcctcattctccctgcgccggatgcgactgtgtcaccgtccggctcaggctccaagaatctcagcagccctgcgctcgacagtcgtggccggtcgctgtcgggcattctcgtctcgctcggggacgagtcggtcggcgaagcaccgcttgtcatctacgcgctcgaagctctcaaagatcgcccgggcatgacctttggccgaccgaatcagcgcacgctcggcctccacgttggcatttaccacgctccgccgtccgaaacgacgacgactgcctctgccagcacttcgatcgggcggtcacttgttcgcccctcgctgagcataggagtcacctcggccccggccatcctcggcttgggcagcggtccgtctgccagcggcagcaacagtatcctctggtcggcggacagtcgcgctgggggctcggtgcgagggtctggagcgcggccagacgatccggcccctcggcgcgtccccgacctcaaggatgtcctcgcgcgcggcaagcgccggagagacgaggcgacggccgaggcagcgcagatggccctgccctctttgattgggacggatgtggctagcacgatcgcacggcaccctccggcgaaacggagagccaagctcgttaagccgacccatgggctcctctcggccaaggtcagcaacgacggcgagggcgagccgatggacggcatcttgtcgagccgatcgacggacgtagcgcggacgagtagcactccggcggacgacgatgagccagcgacgacggatgaggcggtcgagatgagggacgacctggacctcccgccggcgccgggccctcaagagctttccgacggaggcacgagtgggacgcgcaaaaagagcctttacgaggccgacaacaagacagtgcgcctcctctctgtcgcttgatgtacgctttgcaccgctccagagggtgctgaaacgccccgcgcctcaactccgcagacgatcaaacgcgtcgctatgcaggctcttgccgagcgcgggctcgccaaagccgacggccgcttcaaggatgtctggaacatggtctcacgaggcgccctctacgcctttgtacgtcgcgactcatcgccagctgctgcgttccgggtgcgcgaccactgacggccgcttgcgcgctcctccaccatgtctgctctgctcttgcagagggacgagctcgccggccgcgttctcggcatgcgcgacattctcaacgtcgtcgagggccatctcgatctttatctccggccggcctcgttcgagaaggggtgacaagggcggggggagcaggaggcgacccgggccagcccgccgcttgccgtccttagcgatccacactgtctacatcgttcctctttatttctctatggctctgatctgtaagcagcggtgcccctgctcttcgtcgggcgtcgtaccgagcggcgtctctgatcgtccgcccccggaggaagagaccgagcgacttgtgcagatgcgagcccggcgcgctgccgtcgcctccagcgagccgacgcagcagcaagcagcagctcgacctctgtgcactcctgcttcgcatcaccacctcctgtctcctccccctcagcaaaaagacatgtctcgcggatcctacgaccggtacgctctcggtggccatcgctgttctggtcgcaacctcgctcgctgacctggcagcctggctcgcaccctccaggtatctcaccgtcttctcgcccgaaggtgcgtcgctgcccgccgctgccccggccatcacgccgccccagcaatctgcctcttcttgaagccccttccaggcttccggagcgtgtttgagctgaccatgacggctgtgtgtgccaactttgaccacaggcagactctatcaggtcggtgagtagtggccagcgtcagcgcgttggctcggtctctccgtccgagctcccatcaccactctctcctcttcgcccagaccccgtcgctgaccatcgacgcattcctcggctctttctctcccttctctcagagtatgccttcaaggcgatcactggctcgggcatcaccgccgtcgcgatccggggcaaggacacggccgtcgtcgtcgttcagaagaaggtgccggtacgtcgctccagctcgcccgcccacgtcttcagcatctcggcctgtaatcgcaagctgacgtctcggccggcctgcttgcggacctccaggacaagctcgtcgacccgtcgaccgtcacgcatctgttccagattaccccgacgatcggctgcgtcgtgacgggcctcctgccagacgcgcgcaatcaggtccagcgggcgcaggccgaggcggccgagtggcgctacaaatacggctacgagattgaggttgtcgacctggccaagcggattgcgaacatcaaccaggtgtgcgtcccgatggctcggcagccgcctcgcttacccttcgcttgcgtccgctgtccggttggccgcgcacctcgacctcgcgcagccggctgaccgaccccttggcctctactcagccacacgcagcgggcaggcatgcggcctctcggtatcggtacgtgccctcgctcgctcagcctcggcaaccgtcctgccgggatagcactcattctctggaaaaccttgctgacttgcccgccctgttgttttcagtgatgacgctcatcggccaggactctgagctcgggccgcaggtctacaaggttgacccggccggctactatgtcggtttcaaggcgacggcatcaggccagaagcagacggaggcgatgaactttgtgcgttgcgcgtggtcggccttggtgcgtgctggcgtcactgacacctttcactcatcggcctcttgcagctcgagaagaagtggaagaaggtcgaggacccggacgcgccggaatcgacagcagacacggcaaagggcctgacgcggtcggaagcgatcgaggtccgtctccaaccgctctctgttgccgtgcgagctcgcgactgacgcttccgacaccttgctgctcgccagatggccatcgagacgctgtcaacggtacttgcgaccgacttcaaggcgaccgagatcgagattggcctgtcgtcgacgtcaccagacgaggtggccgtcgcgaaggggctcgcgcccggccggtggcggacgatggacgaggcagaggtcaacgagtggctcgttcgcgtcggtgagaaggactagagcgccggacatgtgtctgcctggtcaagggaccttctgcatgagcccttgcccaatcatgcttgtcgtctccttgacgaaagctgcggcgccgacactgaggacgagcgcgggacgccggtctatcgctcggctgagggtgcctctgcaactccgcacagtcgcgatagcatccgattctgcctcacccgtcaccgagttgtttcgctggtcgcgctagagccttactcttgtaagaaggtgtctggagtcggccgacagttgagctggctctgtcggagcgcagggacgtcggctagctgcatcctttgcccaccgacctcccgacgtcaacctcgcaccggtccgtcatgtaaagcccggaccaagcctaatcatcctctcaaacgatgctcgtcttgactatccgtggtgcgtcccgcgctctcgttctggctgacctctcgtcgaggaggtgtagcgatccccgctagtggcgtccggctggaggcagcgtctgtcttctcctcatacttctgcgtccgcacccgactcgccgcccgattcgctctctctcgccaggcgacaactgagcccaccttggtcgtcgggcctgggagcgtcttttcgtcctccaacgactgtcctgacaacccaagcggccgtcggaaaatgaaaacggccgcgggcagatgcacggcacagagcagcgggaaggctcgttcagtgacgcatggcacggtttcatgacgttgcgctctgccctcacccctcgtctcgacctcggcgccccttcacatcgacatcctcttcctaactgacctttttactgcgaggatcgctgactgctgcgctgacaaaaacgcccgctgcgcgctccaaccgtcgggccgggtggtcggcgcatccctttcatcggccttccccccttcacgtcgcaactccgcctcgacaggccttcaccctgcagctcgtctgttgcgagcgtcttagcgaaggcgcccgccgtcgcagcgtataaaggacgacggccgctgacgactcgagactagaccccagaaaaggtcgaccttcccatccgccccaattgcagacatgcttagcagcctcccagccctcaccactccgtcgcaaaccccgctcgacctccacctcctagatgtccaccgccggcccgagtcgctctttgacctccctcaagctctcgacctcaccccgccaccgtcgccctccgcgtcgttgacgtcgctcctcctcctccctccgccggcttacacacgcccttgcccggcgccctcgcatccgccgccggcgtacgcatctcatctggcccttcaaccccgaccaacacgagcacgagcagcggtgacgacgccagccgtcggctcaatccctcaagtttcatcgtcaaggagtcgcgctgggcaagcagacgcaccgcccgccttgccgcggacgctcgtcggcatggcggccgcgcgcctcaagcgcgagtttctcagcttgccgacggaaggtgtttggagcgggagggacggccggcgacgtgagtcctcgtctgggcagatcctgcctcttcctctgttgggcgagtgggcgtcgggctgacaagggtggggcagggggggtctttgtctgacttccgctttgctcgccagcgaccagccgcttctgattaccggcagatactgagcgactgaagggagtcatcggacgagagcattgtcggtacgcgggttgggagaatatcggatgcatggcgctcgagctaaacgtattgctcagtgcgacatgacgagttggctcggccctgagtatgcacggaccgcaactgcctggcgacggctgtgaagagcaaagagagtaaaggaagcatcgggatacgaatgctgcagagggtttgtggcgggtacgagaagcgagagagagggaggccagtgtttgaaaagggtagaggggagcgaaagtagttgtccctctagtggccgtgaacctggacgcgctccttggcctccttctcggtcaggagctcggcgtcgacgagaaacttgcggatcgccgcccgctggtcgccctggagctgaatgacctggcccgactcggcgtcctcgacgacggtgccgttgcaggcgaactcctgaggaattagcgcggaagggaggagagtcagtcgacaggaaagggctggggcgatgctgagcggctgggttgcaaaaacgggacggaccttcttgaacgccttgaggatcttcttcgggtcaaactctgcgcgatcagggcagagtggaaggaggtaagaccggcgtgcctaaagggaaagcggttgaaagggaagaggggacggacgcttcggcaggccctggagggtcgtcagcgtcttgcggccgttccgctgctggatacctgcgcaagtcatcgggcgcggaagttcagcggttagtttccgtcgtgaacgagcgcgagggaagagatggaacggacggatgtggattttgttgccaccgggggcgtcattcttgatctgctcggccggggtgtcgtcgtcaaagtcctcggcgaaggggtctgcgagggaggtcgagcaggccaagcagaggggaagggcgtcagctgtttagtccgaggtgggtgggtcggtcgtcatcttggacgggggcggcgaccaccgagatctacacgcgtaagatcgtcggcagcgtcagatgtttataagagacagcggatgggcaggaaaaaaggctcggtgggtgatgatgcgctgaagggggattatctcgttcgttttagaaaaggagccggtagtgtaggaccggggttggtatgagagacggacaacttgaagccgtggtgcgaccgggcgatgcgagaaagggaggccaaagggagaagtcgttatgcgggcgtcgtctttggtggggagaaaaggcgggggtgtcgagacgcgaggagagggcaggaggcggagtacgtcgcagagcggctactgctgctgctgctgctgggccgctggaagctgctgctgctgctggccgggctgctgctgcggttggccgcccgccggcgcggtcgagcccgtctcatcgcccgagatgccgccgaggcatgccatccagatgcgcgtcttgtggtctgaaggttgttaccgccgaggagaggaagaatgtcagcgctggccgctctggccgaggtagcacccgaaggacgcacagcggaagagctcgcggacgagctcgcggaaatcgatccggcgctcggcgataaagtagaaggtcaacttgcggcggtccctgcaagttcggacagggcagcagaagcggtcagcgcctcgagcaggacagacggggcgcgagagcgcagaaacacggaccactggaattcggcgtcgacgacctccatcggcaggctcttctgcttgaccttctgctggcagaggacgagcgccttcgcctcgtcctgcatcttggtgacgagcaggctgggagagcgagcgagcgagcgaacgagcgggggtcagtcagagtgccgtcccgcaagagcgaggcgactgcaactcactgagcgtccagcggctgagcctttgagtagatacgcttcggcatgatctcctttgcgaggccacggaccgtcacgctgttgggtacgccgaccggcgagccgccgtcggggccaggaccgccagccccgccttgcgcagcgcctcctccaccgccgccgcctccctgattgcccaggccagcctgctgggcaatgagcgcgagctcagtctgccgctcctggaagcgcttgacctcgtcgatcgaaatcgagtcgttgacaatcttgccgagatccttgccccggtcggcctcgacgatgacgaggtcgccctttgcgaggccgagcgagcggtcaggcgagtagaagaggtctgtccggccggccttgaactcgatgatgtagagcggcgtcgaggaagggacggcgtgcagcggcaggcccttgccgaggtcggcgagcgacgggccggcaaccggcggcggcgagtcgagcgcgagctgccgctggtggtgggcgaggttgtactgcggcggctgcgggtagaagttggggtagggctggctcgattgctgctgctgctgctggggcgcgggcgggagctgctgctgttgctgctgctgctgcgggtggtggggcatgtggccgccgaaccgggggtcgggtccaaggccgccaccgccgccgagcatggggttgaagccctgcggaggcggcccaccaaagccccggccgggcccaggctggccgaacgatggcggcatgtcgaacggcgagccaccgggcccacctcctccgagtggcatcggcaggccaaacggcgagcctttgccgcctggctggccgcctggaatgaacggcggtgctgtcggcgcaaacgcattgaaccggccgtgctgctgttgctgctgctgttgatgctgaggttggtgcggccggaaggacgggaagccgccaccgtcgccggggcgctgattggtggacgaggacggcgcaaagccccgcgtcgtcgtcaacggcgtcaagccctgactggcggcaggcgagcggaggatcgagcttgcgaccgggtcgggccgactcgagctccgctgctgatgctgcgactctggccggccggttgcaggctgctggcggccgacggacgagccagagtcctcaaggcgaccgccggcagggctcgacgcctcgcgcgagcctccaccaccgggcgcgaggccaaagctccgttcgcggccccggggcgaggacgcaaagtcgtcgtcgtcgtcgccgccgacgccggcggaaggcggtccccagcgagcatgatcgggccgcgtaaagtcggcaaagctcgcgctccggctcttgctgcctggccgctcgagcggcgcagcgccgagcccgccgccggctaccgaccgatggtcgcgctcgaccgaagtgctgccagcgcgcaacgtcgccgaagttgagaggtacgagtgcgagccagagtgggggcgcgaggcgatgggtgagagaccgccgactccgagcgtcgtgcgctctgtcgccgagtgccccccggcgccaccaaacgacgaatacgaccggggcggcgacagcgcggcgtagatcgggagcgacgaagggtgctgggccgccattgacgaggacgggacgtgaaagtggctgccgccgccttgaaggtcgtcgtcttggaccttgaggctgagagcgttgccgaggctcgtcgcgagctcttcgtccgagaagccgcctccgccgctcgtagcgcgcgagaagccactgcttccccaggggttcctgccgacagagctctggcctccgccgccaccgccgacacggaagtcgggcagggccccattgccaccgcccatcttgccgccgggaacgatcgagaccgaatgccgacggctgccggttccactgttgaggcctgcgctaccgccctgctgaacgccgccgggcccatagccaacgccagcgccacctccgctctcgagcccaaaccggcccgagctttcgatggcgtggaacaggttgatgcccatgccgccatagccgcctctgccgttggcgcccgagccgcgaccgaaaccaaactcgtcgaagcgcgacgacgaagacgggttctgagaggctgtcggccggcggggcggctggtgaaaggcggccgtgtcctgaaggatctcccggaggtcgcgcgcaaacggcgagtgctgaaggaggagcgctgagggtcagcgatggttccaaggcagcttgagcgcacggcgaaagacaagatggacgttattgctcttgccatcgtcgtgtggccggctgctttggctgagctcctcctcctcctcatcgtcgtcaattgcgctagctccggcgccagtcgtgctcgtgaagctgaagctcggcaggccaccgccgccgacaccggcgcctggccggaagccacttgcgaagctctgcgaccgcgaccggcttgcgccgggcggggcatgtggcggagagtgcggccgctgctgctgctggtgagagccactgccaatgacggcgctcgcactcggctgccggacgttgagctgcggccggtgcgaaggagagccgatgggatccggcagagcgcgcgaggccgaaggcgaccggcggagccctccggcgcctggcccgcctgcgagggtgtcggtcttggacagcgagctcatgcaaggtcgatagaggaggcggcggctggcacgcgaggtggcttcagaagcggtcggtgaggacgatccaatgaggagcctgcacggcgaagcaagacagcggccgggctggtagcgaagaggatgcaaggggagcgaggtcgagcgggcggtggaggcaagcgagcacaggcgtcagctagctgtagagaggaactagcctggacctgacagcatactcggctagcccggctcgttgcccagcggcggagagccaggacagcgacctgggaggaaggtcgcgagcctcggtggcaatgcaagcagacgggccgttacgcacaagaaggttgtgaagggaagccgctagcgggcgagatccatccaccaaggggacggccgagcgggaggagggcgagaggtcggaggtttgagacgcgatctaagcgggaagggcaagaggagagtcgggtcggccggctccgcagggcaagcaagaggcgtcgaagcgtcgaggcgtcttggcggtggcggctggctgctactgctgctggcttcgcgtggagggcggtcgaagacggccagggagagcgagaacgggcgatggcggcaggtgtgcgaaaggaggtgtcgggcaaagacacacgcacgggccggtggaaaggacgtcggccgcggggaacgaagggcggcggtgtgggggagaggaggaggtgggcgaggcacggacgacgtccggggccagcgcgggggaggcagcaggcagcgagggaaggccaggtcagcgaccaggtcggcggcagcagcagcacttgcaggacagcgacgcgtcagacgcacgagaggaggtccaagcgagcgataaagcggagggaacgggtcgtggctggctgtcagcggcgagacgaggaccatctctctgctctcttgagctgctcgagaccaacccggccggggccgcccgcgtcgtcggatgcagcagcccagaagcgagctcgacgcaactcacctcgaatgatgggatctcttccgtctagatggaaagagaagcgggcctggtctaaggcctcgtctaagcgaaccgggtctatgggcagggtcgagggtggtagagacggatcgcaagaagcgggcttgattggggggggctgaagcctgtgcgtgcgcctccgccgacgggccgtgcaacagcagccgttcgcacgctctctcgggtgagacccgacggtggctcggcgcccgttgagccgggccgtcgccgccagcagcagcaggtcaagccagcaagtgagccatgataactcctttgagaggcagctgcaacatgcaacgacctcgtcctcgacttgaggccacaggaattgcgctcttgtacgctgtcttcatcgccgcagaaacactaaatatcgataagtcatcgtccttcagatagcgtatgactggcgctcgacgccgaggcgcgaaggcctgcccttcagacgctcgtcttcggcttggaccgagaccgagtggccgagcgcgtgcctttcgcaacggtccggatttcggcgccgctcacttctgtttcttgttctcgaccttggcctgcttgtccgcagcgacagtcggctcgtcctcctcgtcctcgctccggtcgtcctcgatgaccttcccccgtacggtccggacgagaatgcggaggatgaggtaataccagaaggcgttgaggagctggatcaggaagattggcacgaagatctggtagcgcatccagggcgccagccagtggcccgtcggcgggtcaaagaagcgggtgtacgctctgcgaagaaaccgccaaggggggtcagacagacttggtgaggcgcaaaaggggcgctcgcaggcagcatcaagccggcaagaacgtacgggatgaggtcaaactcgtaccaaacggaccagaggatccggatgttaagccagtgccggaggtaggtccagacgacaacaaaccacgcaaagcagacggtcgaccagaagcccgacgactttttgccctcggcatagttgacgcactttgcgatcgcaagaaagacgtccgaaacgtccatcgtgatgaagatggcgttgccgatcatcgtcaggttgacggcgtacgaccagccaatgagccagagcgtaacccagtgctgtcggtcggccgagaggggggttcgtcgtcagccggaggcgcgccacagacgctcaggtgcggaggcgtacgtggatgacgagctcgcggtagtccttgcggggcttctcaatcttggcgatcaggatgagcatctgctgaagccagtaggagaattggagcaggtagtagtacttgaggaggccgaccatccgccagtgcgggtacgcgagccagaactcggacgtgttgaagtctgagtaaggcaggaccgcaagtcagcaggtcggcgccaatgtatcagggagagtttggcgcgaacgcacaccaggtcggcaggtagtggtacatgaggtagacgcccgtgcagccagcggtgccatagtagagggccgagtagctctgctccatgaagcgcgcaatcttggcctgcttgttgatgccgagccggagagcccacggccggagaatgtagagcgtgatcgactggcggaggaacgaaaacgtaatgatgtggtgcaggaggaagacaaggtcctggtgttgggcagcacatccgacggtagtggcgagcgagcgtatgagatcgtcagcacccggaaattgtcgaggtagcgtgcgactcaggtaagcagatagcagacgtacgagcacacccttgccatacttaacggtgccaatgtctcccggctccagcggcagggcatacgagattgtccagagcggcgcaaaagggtttgtcttgggcaagccgacgatgccgagcgcggggccaatgtaggtcgcacagaggtgccaattgatgtagagcgacagcgtgaagagaaggagcgtcccggacgacgctaaaagcagggagagccggaatgtcagtcaatgcgttagccctgcggcgaggcatgcgtacccgagacgcacaggggatgaccatccaccggccggtccagaggtcctcccagaagccaaagctggccgggatgccgcgcgcatcaccaaggtcccagcggtcccgcttgagctgggcccgccgggcggcggcgctctcgttacctgccgggagcggcttgacctccgaggcgacggcggcggcgacgggagcagcagcgacggccgcagggtcggcgtcgggctttgcaggcgagccagcctggtactcgtgaagcggcacctgcgacagggccgactggagcgagtcggagcgcgagcgtgcgcgcgggcgggccggagtcgacataagcagaagaagaaggggatgggaggcaagaggtaggctgaacgaggtcgtccatcgccctgctgctgcttgagcctttctccgaaggcgcgcgcgcgcgctcgcaggtgcaggtccggccgccctgcctgcgcgtcgtccctttcttgcacttcgccttcaccaacctctccatccccgacctctttctctccccttcctttttttccgttttctcccatcatgcagggcggcaagcttccttatatggtgcgactgctcttttgcgctctctgagcgagcttctgtcccggtccaatgggctgacgcgcgcgccgcctggaccctcttcccctccttcgcagcaaccgacggtcgtcctcctccgcggtgcgtcctgtcgaagcctctctatctggactgctaggtcggcgggcggtccgcagctggctcaaagcagaggacctctgtgacttagattctttccagcctatgctgactgccctctgcctcttctcgtcgaccgtcacgaccgtcacagagggcaccgactcgtcgcagggcacgccccagctcctctccaacatctcgtcctgcctcgccgtcgccaatgtcgttgcgacgacgctcggcccgcgcggcatggacaagctgattgtcgacgccaatgtacgttcagacgctcctccttcgatgctcgcttcaacttgccacctccgggtccgccgcgacggacgcagcggctttcaaggaggccctctgtgggcaaagaactcgcgagctgcaggccgacttgactgtcctcgactgaggctcgcatcgtgacgctcttgtaaagggctgaacagtcgcgaaggaggtcgcttggcgatggaggcgctcgtggtcgacctggacctgggcagcggccgctcgtcgactgagcagacaaggacgcggtcatcctacttccaccttgctttcgcgctctgagcgtggctgactccgcagggtcgacggccttgctccggtcaaacgagtcagcttgctctgcgggcgcatgtgctgactctgccctccatcctgccctcgttactttgttatcgacctgcgcccctcgcccgcttacttcctctggacgaccctcggtctctatcatgcagggcaacgcgaccatctcgaacgacggagcgacgatcctcaagctgctcgatatcgtccacccggccgcccggacgctcgtcgacattgcgcgcgctcaggacgccgaggtcggcgacggcacgacctcggtcgtcctcctcgccggcgagatcctcaaggagatcaagggctttgttgaggacggcgtcggaacctgggtcatccaacgtggcctgcgtgagggtgcccggctcgccgtcgagaagatcaacgagattgccgttgcgatcgacaagagcgaccctgtgtgcgtccccccttcgctggccaaccctcggaaggccgctggactgactctgattctgtactgcgtgtcccccaacaggcagttccgcaaacacctgctgctgctcgcggcgacgtcgatgtcgtccaagctgatccactcgcagaagcccttcttcagcgagatggtcgtcgacgccgtcctttgcctcgaccaagaggatctcgacgagaacctgatcggcatcaagaaggtacccggcggcggcatgcaggactcgctcctcgtccggggtgtcgccttcaagaagacgttctcttacgccggtttcgagcagcagccgaagagcttcaaggagcccaaggtcctctgcttgaatgtcgagctcgagctcaaggccgagaaggacaacgccgaggtccgcgtcaacgaggtctcggtgcgtgggcgttcagaactgccggagccaatcgacatcaggagctgaccaccgcctctatacaactgcccgccgactgcaacaggagtaccaagcgatcgtcgatgccgagtggcgcatcatctacaacaagctcgaggcgattgtcgcgacgggggccaaggtcgttctctcaaagctgccgatcggcgacctcgcgacccagtactttgccgaccgcgacatcttctgcgccggccgggtcgcgccgcaggaccttaagcgcgtcgtccaggcggttggcggctcgatccagtcgacgtgctccgacatttccgacgagcacctcggtcggtgcgggacgtttgacgagcgacagattggcggcgagcgcttcaacgtgtttgagggctgccccgaggcaaagacgtgcacgctcgtcctccgcggcggtgccgaccagttcatcgaggaggtcgagcgctcgctccacgactcgatcatgattgtcaagcgggcaatcaagaactcgcacgtcgtcgccggcggcggtgcgaccgaggtgcgtcccgcggcagaggagtcttcgcgttttgctctcggcatgctgacctcctcgcccggtcacagatggaaatctcggcctacctccggtcgcacgccaagacgatccggggcaagcagcagctcatcattggcgcgcttgccaaggcgctcgagattatccctcgccagatctgcgacaacgccggtttcgacgcgaccgacgtcctcaaccagctccgcatgcggcacgcaaagggcgagacgtgggccggcgtcgacatcgagagcgaaggcgtccgcgacaacatggagaaggtgcgcttctctctcacgcgaccacagtcgagtcgtcctgttcgctgacgcgcgccgctctcgtccttcaccagtttgtctgggagccgagcctggtcaagacgaacgcgctctcgtcggcgattgaggcggcttgcctgattctctcgattgacgagacggtccggaacccgcagtcggaggcagtgagtctcccttgaccgtctgcgactgcccgcccaccttctcgtgcgagaggctgaccgatcctccgtcccttcctcttatccagccgcaggctcagggtggcatgcccgggcgtggcggaggtatggccggtcgcggcggccggggcatgccccggcggtagggttttccctcgaccgcaacccggcaaagggaaaaaggaaacagcagaaggcgcgcgcggagggatgtatggagcagaagggagccagcgtcgcgtgtgcgagcgagcgtccccttcacttgaacccttctcgaccagagaggcaatcgacccccagatggatggtctgccctgcacgctgcttcgtgcctgcctgtcaacgcgcgaccgccggcgggctgggatgctctgcgctcgtctgagccgcaggggcagtcatttagactgacatgttacttcccaagcctgcctgtcagcccctgcggcagttgagagtcgcgaggcccagcgtgtcgacggcctgcttgcggatcagcgaggacgcgcgcgcgcttgcccctttctccttgcgccaagggcgtgccttgcccgcctcctctctccctctggcgggcgccgacgcctcccgctttgatcctcttcttgcagtcgccggtcgaatcagccagtcgtcgccgccatctttgccctgaccaccaccacccttctcgcagtcgccagctcgacatcctccccttccttcctcgtctcatcctacaccccctcgcacgctctttttcacggcttggactggtccgcccggccaagttaccgctcgcatctaccgctgagaccctccttatccttccgcaggttccggcccgtcttgccacccctccgccttcctctggccctcgctcaccgcccagcatgcccgccctcactgcattcctcaagacggccgtttccgctctcctgctgctcacctcccgcgcgctggccgctccactctacacccgcgcgctcctcgccgagcggacagaaacgacgctggccgtcctccaggtgcggaccgtcgcgcgcatgcggccgttcgcccgaggccgagctgacaccaacaccgttcgctcgcctcgtcgctgccctctgcttcttgcagttcgcatgcatcctcgagcatctcgagagcgcgttctacgcccaggcgctggagacgttcacccctagccaattcaccgactgtgcgtccgcccgcgaggccgctctcctcactacttctccatcctctcctgaccccttcgccgccatccacgcgaccggcagccggctacgtctcgtcccagctcgtcatcgacctcctcgccctcgtcgcctcagatgaatcgacccacgtgtcctccatcgaccgcgccattgcctcgctcggcgccgagcccgaaggtccccgctgcacattcgatttctccagtgcactcggagacgtaaagacgatgatcgcgacggcgcggacgctcgagcttgtcggcgtcaatgcctacctaggtggcgcggccctccttgcttctgctgctgaggacgtcaacgccctcactgccgccggccaagtactcacagtggaagcgcggcacagtagcttgctcaacacgcttgcgggagggagctttcagagcagcccgttcgacacgagcctgacgccggcggctgtgcttgcgctcgcggtgggcttcgtcgacgaggggtcgtgcgacgttgtcggcgcgacgggcgtcactcgtccgacccctgccttgcctgttgcccgctcatgcctgctctactaactctcgccctggtccatccgctcacagccctccccgccctcaaagtctccaccctctccccgcccctcgcccccggctcaaacctcaccttcaccaccgccaccgacaagccgctccccgacgccaatggcacagccgcctgccagatgtttgtcggcggcttgccagtcgcgcttgcgttcccgttgggggagtgcgtcgtcccggagggcctgacggggccggtctttatctacgtgcgtgtcctcgcccctttttctcgggcgtctgaagcgcgctgatggcccttttgcgtgtggcaggtgacggccgatgccaacccgctgcagacaaacgtcaaccagcaagacgcctcttccatcctcgccggcccggcgctcgtcttccgttcgtccgacccttgccctccttttcccgccgcttgacgggctgacgtctgcgctttacgctcgcttgtcagtcgatccgcccgtcccggagctgctcgctcaggcccttcagaccttcgagcctagtatgtcttagtcactcctggacgattcgtctgacggtctcactgacctaatggctttgacggcttaatcagaggcgcccgctccttccgtcgagggtgctccggcagcgtcgtcggtcgaccctctcttctccagggttgtcagcgagaagccgagcagcggcactaccgacccctaccgggcctaagcccaggtgaagtcgccgcttccgcatcctcctctacccctcaccttttctcccctcgaagcgtcgcgtccgttgatcggcgcccttctcgtcctccttccatacccgaccgcaccattctgtactctacctcccttcccggccaccacttgcccggctgtgaatcatggtcagtcacccgtcgaggcaaggggaagaaggcaggctcataagatcgtgaataagagggcgaggggtggaaagaaatgttagggatgggcagctgcagcctgacaacgtgacgcggctcagtaatactcgatctcgagctgcagcgagtgggtggaaggatgaagcctgctgcgtcagcgaaaagagtgtgagaaagagggctcgccacccgtacgcacaaactggaaagcgacggctcgtgggctccggatcgagaggccggctgggtgccagacctctgcgttcttgtgctcgatcagccgctcgagcttgtgcaactcctagtagagggcgtcgcactcggtcagcgaaagaacctggccagtcacctgtcgcccgcccggtcgaacgcaccttctgaaagtgcgagctcgcccagaggagcgagagatgcatcgtcgccaccatcagcaggttgtcgaggacggcgtgccggctcgagttggccgagagcaggagcgtgttgacgtcgttgatgaggtcttggaactttgtagctgatatctttgttggcgggagggaggagaggagggctgtcagcgttcggagggcggctgatcgactgactacgaaaggggggaggcgaactcaccctgccctcgagctcgagtgggaaggacgtgtgaaacctggcgcaaagaaagacgtttcgggaaggttcagcctcaggatgcgtcatcgccgtccgggtgtcaacatgcaagagtccccagcacgcaagaaaggcaagcaaaggacgcactgcgcgacgtcgccggcgacccagtcgcgctcgacgcggacaatctccctcggcagatcccggccgatcgtattcagctggggcgtcccaaattgtccaagggcgggcgttcccgagagagcataggacgagacgggtccctttgggctggatggagggtcgaagaggggtcggcgtgagcgagcgatcaagggggacggaagcagggctggcgacgcacgcgtcgacgaccggctgcctcgagtcgaagccgccgccgacgtcgcgctgccagtctacggcgccgtcactgtcgtccggctggaagtcctcgagcccatcagctgcatgcagatcctcgtcgtcgactgcctcgggggcggcggtcgtccggtggtgcaagtgcttggtcgcggcggtcgagctcgagcttggcagcgccgacggcgggccggctgcgagggccgaaaggaggtcgcggttcctctcgtgcattggcagccgttctactgaggacgacgacgggggctggcgggcttgcatcgagatgggtaggaggaaagttgaaggggtggggggttaaggagggtcgacgttgttcggcagcaggctggtcgtgctgcggcgtagggcgaggcaaggcggcgcgctgcgggcgggcgggcgcgcaatagttcaactctcgactgccagaacatcaagtcaagaagtcatgacatcgacaaagacgctactgggcagaccgccgggccgacttgatgcgctcggccgccatctcggcgacaccataaatcgttgccgaaagatgcgcgctgacctgcatcggcaggaccgacgcatcgacgacgcggacgttcgaagtgccgtagacgacgaggttgccgtcgacgacgccgccgagttcgcgtgaggccatcatgcacgtcgcgatcggatgcgagacgcttccgaacgtcgactggatccactgcgaccagtctgcgtcggacccgccggtcgccgagtctgggacgagcgcgtagcccggctggttctcgccgctgacgatgtcggcgagcggggccgtcttgaaggcctgccggccgaagcgcatgcccgcaacctggacgtccatgtcgaagccggccgaaaagtagcgcgggtcgacctgcggcttctcaaacgcgtcgcgcgagacaatttcgaccgacccgcgcgagaagggcaagagaccccacgagtcgagtccgaagccgccgttcgggtagccgctgtcgaagaaggcctcgaagaggccgacctggccatcgacgatgagcttttgctggagcgcaaagagcgcctgacccgcctccgccgagacgacggcgccggcgtcgaacgcctcctgggcgtaggtcgcgatcgaggcatttagacgctgcttgaccgtctcgcgctcggccgcgtccgggaagaggacgtcgaagccggggaaggcgatgcagtcggacgggcccttgccctcaaacgacacgccctcggccagcgtgaagcccgagacggtcgacgtctgttcgttgagattacgtccgacgcccggcaggtcgaggacaacctcgacgccagctgcggcgaggaccgaggccgggccgatgccgctcagctggaggagggccggagattggatcgcgcccgccgcgaggacgacgtcgcgctttaccatgactgagtacgagggcccgtcggccgaggcctggaagtgaacggcgctgacggcgaccgagccggtcgagttgtcgctgacgagggcggtcgcctgccgttgagatttgaggtcagctgacctgtctctaagcaagaggtagagaacggacgaaagaggcacgcacctgatggcccgtcaggacgagcaggttcgtccggacgtgctcgaccggcccaaagtaggtcgtcgccgagcttgcccgctcatagttgctttcggggttgagcatcgacagcgtgtaagcgacgacgcttgcattgccgccgttcaggtcggccgagagcgggacgccaaacgactgcgagagggtcgagacgaacgagggctggccggggccggcgtacatctgctcggggaaagtcacctgcagcgggccgaaagtgccgtggtaggccgggacaaagtcggcacgggccgcgcgctgggcctcgttgggctcgtaaaagttttcggactgagagtaggtgtgcgagaacgaagaaaagacgtcagccgtcctgatcctggagacgatcgaccagagaacccaggggcgcgcaccttcttcatcgcctcgagcatcccctcccagccccagccctcggtcgtcgagtcgttgccgagcaacgtccgccacgcctcgtactgcgcggcctcgccacgcgtgtagtgcccgccgttgatcgacgatgagccgccaagcgtctttccgccgccgatccgctggccggttgtcgtcggccaggaccagtcgagagtagttccatagaaagcgccgtatttggagactgcaaggaaaaggggcggctgtcaggtgcaggatcagggagacagggaagggaagaggactgactgtcgtagacgcgctcgtcggtccggtcgtcgttgcccgcctcgatgacgaggacctataccgtgcgcatcaggtgaaggcctgagggtcagcgctgagctcaagcacacacgacgatgcgggagggaccgaaccgagacgtcctcgtcctccgagagccggccggcgaccgcgaggccggccaggcccccgccgacgatgacgtagtcatatgaccggccgtcgacagcttttggcgaggtcgtcaggcccgagggaggcgcatcttgccgggcggaaggacggagaggagcggcggaggccaggagggcgctcgtgcttgcgagcagaagggtcgggagcagcatggtcagagtgaagaaaggaggtcgtcgtcagaggagatcagctcgacagactcgcctctgcttccctttatagcagcagcgccggctcgacctcggcggcgccttgcctcagtcttcatggtcaacggccggcgagcagagagagacaggcaggtgacagcaggccgactgactcccttggagcaacgagtgtcacgggcgggcatgtcggcgggcgtcgcgagtgaccttttgcttccggcggaaccgcgcgggcgggtctatgcagcaagacggggtcgatgcatcgacgtcacgcctcgccgccgggagcgacccatcgtcggcagcctccttgctctctcgtcgccctgctctcaacctctcaacaaccccgaacaagatggcctccctccctaagcgaatcattaaggtcagctttctttggctgccctgtactggccgcgacgagagccagtcgagcgaccacgacctccgcgacggcccggtcgtcgctcgctctcgcacctcctggccatcgcgtgccgaccccgacccgaccgtctgtctgacgctctctttctctgcttggttccgtccaccgcctgccgcaggagacccagcggctcgtcgccgaccccgcgccgggcatcagcgccatcccgcacgaggacaacctgcgctactttgacgtcatcatcgccgggccagacggcagccccttctcgggtcagtccctgctctcctcgtcgtcatcccgcctcatctctctctgctcgtgtgccgcttgagaatctggaaccttaagagaaggcgtcgtatcgcaggagcgtagtcgacggccagcgttcgggcggaccggcgaggcgacaaagggaggccgacgagcctcatgcatgacgctgcgccctcctccttgccatcctccatcgccgctgccgctgctcgctcgatctcatcttcgggatcccgtcgcctagccgcccgcccagaacaccttcaccttcctgacgactgaagctgacctgactcattcgcttcgcaggaggccagttcaagctcgagctcttccttccggaagagtacccgatgtcgcccccgaaggtccgcttcctctcgaagatctaccacccgaatatcggtcagtcacctttcgtttgcttgcctgcatggcgctcctttgcttttgcgggcggcaggagatcggggcaatgctgtctgcgcttggcctgcgctaggcgctgaccggtcggcactcgctcctgccttgcgtcctcgagcgcagagagacggagactagcagctgacccccctcgtcgcggcctcgaactgccacagacaagctcggccgcatctgccttgacatcctgaaaggtcagccttttccgttgccctctctctccggcatcaagacgctgacctagacgagaggctcaaatcaaacgcgaattcagacaagtggtcgccggcccttcagatccggacggtcctcctctcggtccaggccttgctgtcgtcgccgaacccggacgacccgctcgccgtgcgtccttccgcctccaccagcagcccgtccctcccttcggggctgagcggcttggttgcgctcaagatagagccctcgctgaagaaaaattctctccctcgacgcgttggctcctgacagaatgacgtggccgagcactacaagacgaacctcgccgacgcccagcgggtgtcaaaagagtggaccgcaaagtacgctgcctagaggccgggtgcactcgcattcgcccgcacgcgcggctcgctttccttacagttcgtgcggggtcgggtcggtcttggacggacgcgtacctactccggcgtccttgcggcttcgggtagcgtacagagacgggagcgggcgcaggcgcagccgggaggaggggctcgccctttactggtcggtgtgcacagagagggtcgaccggccggcctcttcgtcgtcctgccgattgtggtgtccctccagtctgcgaggcctctcctaccttctccccctttccgtctgcctacctttctcgccacacgctcaaccgactcctcccgcgacatcattaccccttctcgtcacccgtgtttccctagctctttccccgcgcctcccgctattaaaaaaaaaagacaaacgtctatcaaggcggccgccgtccggcttagaggggaaggcgaggtaaggcggttgctgggcaggggcaagtgcctccggggacgccggacgagcggccgccgccgccgctgcgcgctcgctcccctcccgcggccatcatctcgtctcctatagccctcgcagctggactctaccaacagcaacacaccgttgcctcgttccagccagctacatttcacacgccacagcatgcgtcggtcgactcggacagtgagtgctttagcggcaggctctgctcgtgacgagcgcaggccgaagctgacctgcctgcctctcgcctgcccgcgccgccacctctgctccagctccagaagcgccagaaccgcctgccggtcgagcttcagctcgccatcctccgcgaggccagcatccagcttgagttggaggccaaaggcaagaagcggctctcggagctctgccttgtctcgcgcgactggcgggtgcgtcgagctgcgtgccgcacggcccctttgtccagctctggagctgacgtcaaagacaccgctggtcctcttgtcagatcgagggccagcgcctcctctaccggtcgatcgcccacagtcgccgaaagatatctgttctcatccgcaacaagccgcgcatcgcagccgtcatcgaggagattgacatgcgttacgtgtcgtttcgcgataccgacgaactcgccgccatcttcgctcagggtagccggcttccgatgctcaagagcctcaaaaacattgtctggacgtcgaaggtggcagcctcgctcccagccccgctccccgttcccgcccttcggtcactctcgatccagtacaggccggctttgagctatgggctctctgctcccctcgttccgcacttcgacctctcagtgctgcaagcattcgagcggtcctactgccacggctccgacttcgacccggccgacctcgccgaacttccctcgacgatcactcgcctcgatctccgcaacttctcgccgaccaagctcggcccggtgctccaggcgatcggtcgcttcgtcgacactctgaccgacctaaccttgctgcctcagtacaacaattggaccggcacctcctcgctagtgctccctgttttgccgagattgcggtgcctggccatcaaccatcaccaaaatcccggcgtcttcattaccgcgcagccggctttgaccaacctcggactcagctgggctgagtacgagacgcagcccgcatccgacgtcgcccatctctgcaacatcatcagaaaccaccctggccgcttccctgctctcaagaacgtcgtttatcacgatatgtacggtgggcggcggaggttctccgcgttcgtccctctcgctcccgactgcagcgtttacgagcggcgaatcgcagctcttttctcccggcgggcgacggcgctccgcgaggccggccttgcctttgtcgacgagcttggtgtcgcttggcgggaggaatgggacaccgaggagccggccgccgaggcctcggtttaatccctggccatcatcctggcctcgcgtgctccgtctcggtcgggcacctgcgttttcccctacttgaacccatggacgactgctcgactttctgtcccagcttgagaaagatgagaatcagcgagatggcaagcgctgggagtgaagtcggcttcgcgaagaacgagatcaacgagcactgcgccgaccgttgcccgagcttgcagcacgggcgatgtcgtcttccacagcagcgaaaagcttcaacgacccttcctccggatcgcggtcgagtccacgaaaagggtggcttggatcggcagtggaggcagagatcgaaggggggcaggggaaaagctacaaaggccaaggtatgggatggaggaggacaaaggggaaggctcttgcctcagtcgctcgcgacctagggaggcgactcgtgtgtgcgtgtgtgggtgggtgtggacacgacggtcggacaggaacgaaggaggcatttatgccgctgggagcgggacggcgggcgccgagggcgaacggccggcagctggcagcgcaggcgcgtcctcgggctgcttcgaggcggtcggcgaggtcggcacgggcgttttggcggctccctgatattgaggcagcggagaaatgtcagcaaggtgtgctacgacatccgagccgccagagacggactgacgttcgtctgctgcgccgcaggctcggccgacgcctgccggctgatctctgccggcggcgggatctcctcaattttgggccgcttggccgcctcttcgtccgtcggcacgccctcgtggtcgcgcttcagcgggttgcccgccggcgggaccggagcgaccgccgccgctgcagagggcgtcgccgcccgggctggagccgagtcctccctcgtcgtcgtccgctcgtccgaagcgggcacgctgagcgtcgagatgggcccgacggttgagctgctcgcgtgagggacgatcggcgaccgagcaaccgacgctgacgcagccgtcgcggttgccgtctgcggcgcgggcgaggggaacaacgggggcgccgtcgaggccgtgtcgcgcgccggtgccggggtggacacgggcgcaggcgccggcggtggtgcgccgcgcgaatttgagaaggagaagccgccggccaaacccatcaggaggtcggccgccccgcccgtgtcggaaagggcctcgtcgtcgtcgtcatagttgtcgtcgacaaagcgcgacgggacggcctgtgccgcaacgggtacggcggcagcggccggcgtcacgcctcggattgacgagtcgtccgaacgcgaaggcgacgctgccgagccggctggccagccgtcgctcggaccgttcatcttggacgtcttggttgcgctcgatggcgtacccttgagcggcacatcgtgcgtcttgcggctccggcgcttgctgtcgcgctcggcgccttccggcccagacgttcgcgacttgcgcggcttcttatccttgtcatcgcccgtcgcagtccgcttgcggcgagactttgacccgcccgcagccagatcgtcgtcgagcatggggcgcgagccgccagagacgtgctggtcaatgccggcccggtactggccgtcgtcctgggttgggtcgtaccttcgcggcggcagcgggccctgctggcccggatcggcgctaccagctatgctcggtgactttgcccggtcctgtacatgagtgtagtagccgtgcggaagtgggccctgctgtggagccagctgctgctgctgcgggggctgctgctgctgctgctgctgcgacatcgggtggaacggtgaccggccgaccgagccacgtcgagcggccatctcgccgttgcggtcgtccgagattgatccccggcgaaggtcctgcggcacagaccgaccgccggccggcgggtagtagctcaagggctggccaaaagcagtcgcgcccttctcacgggcacgctcccactcggcctcggcgcccgtcatccccggccgctctcccgcgctcgggtggtggacacccggcggtgccgacgtgtagggcgggtaggggttcgtgtacggctggtgggcagcctgaggcggcgggggcgggtagctgcctgcgcctgctgcgccgcgcatgcgaggcgaatcgaccgcctgtgcaccattgcgagggtcaaagagcggccggccaccagatggtgcgcgctgctggccataggcagccgcctgctgctgttgctgttgctgctgcatgctgcccggttgcggccggtcgacgtccattggcgtcgggccatgccgaccagagcgctcatcctgtcggccgtggccgagcggggcgacgggcgatgccattcgcgagggcggatgctgagcgcccagaggcccattcggagggaagccaccagggtggtacgacgagccgcccgccgggcccatagcaccttgctggtcaggccggaggccgccggcgtgctgctgctgttgctgaagggcctgctgctgttgttgctgttgctggggcgggcctcccatcatagggttggccgagccaggccggccctggggtccgttcgcgatcgccgtcggggccgggccgagcgtgcctgctgggccagagttggcgtacgccgtcgggtggacgtcgcgcggcggcggcgggatcggtggcgggccgccgttctgctggaggttgcggaggagcgagagccgcgtcttgatcgtcggattattcgggtcgaggtcgagcgcgcggccgtaggcgtcgatcgcgtcggtaatctgattgttacagctctcgtagagcgagccgaggtcgaaccagacctccgagatgtaaggattgagccggatcgcgcgcgagtaggcatcgagcgcgtcccggaactggttgatctggtagtagaggacgccgatcgaacaccagaaggtcgggtttcggccgtcgcggtagacggcctgctgatagtactcgtaggccttgttgtagcgctggcccgacatgaagacgcggccgagcaggtaccaggtctgggcgtcggatcgatctgttggcgggcgcagacgggagttcagccggcaggagtcgggagctaagatgggcgggcggcgtacctgaagcgagactcttctcgaggtagctgacggcgagctcctggttggtgaacgtcgcgtcgcgctggtggtagagccagccgagctgctggagaactttcgagtgctccgggttctcgctcagcacgcgctcgtacgcctcctttgcgtagatgaactgcaagcgagacggtgcgacggtcagctcgtctggccgggtgctgcatggggccgctttgaatgttagggactgacctccttctgctgctcgtagacgtgcccaatctggaaccagatgtcgacgtccgtcagcggccggggcgggttcttgaggatgtatttgaagcactgtcaagcaagggctgtcgtcagtgagcacgctctttgacggaagggagggagatgacggacatcgagcgaggccgggtacttgtgctgctgcttgtagatgatgccgagccggaagtagatctcgttggccttctcaaagtctgtcgacggcgagcagaatcgatcaggaggatgcgcgccagacatacacaggccgagaaagattgacgcacttgggtccatccggaggacgctgctgaaggcgtcctcggcgtgctcgaggctgccgtagcggtcgtagaggatgccaataccataccagagcttgggctccttggggttcggcaggtggtaaagcgcctgctggtatgccgtgtaggccttctggaggtcatccatcatcaggtagcagtggcctgggaaagcagcaggcgtgaccacgacccttggtcagcgcgcaagcctcaagtcgcagccgtgcgaaggcgacgcaccgagagcgccccagatctcgccgttgtcctgcgagatgttgagcacgcgctggaaaaactcgatggcctgcgagatgggacgaagggagtcaacagtcggccccgaacagcaaaggaagcggtgggactcgccttgccaaagtcatccttggcgcgggcaatgcctgcgacctgggtgagcgcgctgatcgaggccgggttgtggcggagggcgtgctcgtacgccgcctgggcccggtcgaggtcagagagctgctcggcgaccgcacctgcaaaagagagaggaggggagtgaagcgcgtcagaactcaggacggcaagcgaagaatcaagaggggcaagtcgtagcacgcgcgcgcaagacgacgcggatgcgccctaggagcgacgacagctaagcctttgtcccgccagctttgcgagtgggcgaggatccaccccgcgtctgctggcaaacgagccaagacggacgggcacatcggcgagcgcgagaggcaaaggacgaggtgggcccgccgccggcgacggctccaaacagaacctgatccttttcccgagatccgggcacattcacgccccccccgccgagagccggtctatgacaggtcgcgcgcccggctcaacctcgcacgcgggacaaagggattaaggacgtacccattaggagccacgtctgctcgttggcttgggcgagtgcctggacggccgtcatctgctgaggctgctgcggcggcggcggcggcgcacccgccggcgggcctgatgggtgcggcggcggcggcggctgacccggatgacggccgtgcgggtggccgttgtgctgcatcgagcgggagggcggatgggccgtgcgatgggcgacgggagaggaaggagagaggtcggtcggacggggggcgatggcgatttgactcttgcgagcggcgggcgtgtgcgcctcgcgactgagctggcggcgtctcgagcgagcagagagggcccgtttcctcggaaggtcggtcgatcccggggcgcgcgcgcgcgagcaagaggcgagtcggggctgagggactgggcgtcgggccgtgcgagactgctttggatgccgagcgacggtcactgagggctggatgggacggaaggcgtgtgtgagggttgggggaaagagaaggtcgcttcgctctgcctcttctccctcgcgcgccctctccgcccttctgccctggctgccttctccaaacccggcttcgtcgcgctggcgcgggggccctttagcgtggcgtcgcgtgccaaacccgtcaagacgaaccaaacacgctcggtcgctccggccgcgacagcctgctggctaagggccgctctgctctgcgctgtgctggctcgtcggcagacatgcaggcccatcagcagcaatagggctgcggctaaccttgctcatctactgctgacctgttccggcaaagtgcttattttctctcgcctagcactggccttgctgcttgtgctcccttcgccctctcttgcgcttttgttgatgcgtccgacccgacgtctcgatcgcagccgaagcctaggccggccttgcttggctcagccccatcttcactctgcagctggcaacgcagcgaatcacagcgcccgagcggcctgattggacccgacggtcacagagcgacggcgggcaggaagcctggtgcatgcatggtcgcacaagacgagctgacagcccctcctatcccggggcaagggcagagcgaggctccctccctatttttctcccttagctcgggcgtgactctcctgctggccagcagtgacgctgtcgacgctgctgactctcggccgctctttcggggcgcggggcgtccggaaccctcctccatttttttcttgcccgggctcaggcgcgtggctcgacccctcggcccggggaccacggaggaacgctgcaacgtcagctgccgccgccgccgcccatcgctcttttcgctgcccgtgggagtgagtggatggcgagctctttgtcttgccggtccggcaagtccggcaacggacgcgcggctcgaaccctggctgaccaccttcttaccagccagccggcgagaccgcagcgaccgagtcttcgtggcgccacaccgacgtctgccagaggctgaagaggcagaggagcgaccgacgggcagaggagggaaagatagtgcgcaatcgcacgacccgaggcgcgaagccgcaggatcttccattgactgcttgatacgaaacctcgagcaagccgtcgcacggccaggcgcctgccgacaatgtatgcgtctcgaaaagttctctgtgagcgaagacgaggaagactcgagctctggagcatagcggatcgagtgcagccatagctcaaatacgaaacgtcttctcgcttcgccgcatgacgagcaggcaaagactcatgcgaggctcgcccaccttctcacctatgaagccgacttatcaaagcggcatgagacagcagggtgcaggccggtcgtgctgcgcgcagccgaggaagctcgttccgcagaggctattcggccgtcgccgcctttcgccacatttcgacctcgaccacctccttctctgccctctcaccctcttgccctgctcctctcgtccctacgattgacccggatgcactctgccgcaggctcgctcgcccgtgctcgctggtccgtcgctctcggtcggcgtgcgctcgctacatcgacgtcggcagctactccctcaagctctcagcccttgaccaccggaggcgacgatgccagccctgcagcaagatcgcaagcggcggacgactcgaggccgcttccaaaaggcttccaggacgacagtctcgcctccaatggcaagccaggtccgagccaggtcgccatcgcctccaggaccgacgccgccgtctccaaggccgacgacccacccgtctccgcagccgcccacctctttgcgctcgctgccgaggaggatgctcagcctccgccgagccggccacggcgaccaaatccgctcttgagcgagctcgacgagcagccttggacgggcgacgagccgatcgaggcgacggtcctgcgcatgctgatcgacaagcacaagccccagcggacgggcaagatcaagagctcggacgaccggatccgggaggaggtccagcggtcggcgctcgagcgcatgatggacgagggaaagggcatgggccgccagggctcaggcggcgctcgcgtggggggcggtggcgggactgacgagggcggctacctcgccaaaggcatccggcgcaacaccaaggtctttccgggccacctcgtcggcggcgacccggaacacgagccgtggatgagcgagtacgcgacgccgtcgtcgagcgagtcgcccctcgtcaagcgcggcgtcctgcttgcggcagagcggtcaggtcttggtcgagccaaggaggacccagcagtgcggcgggccctcaggcgcgagcgagccctcctcgctggaccagttcgagccgttaacgccaagggcaaggcactcgactttcagctcgacaagctctctgacaagaaccgaactgcgactcgcatggccgagctggcggcggccagatttgaccagattgacgaggacctcgacgtccgggtcgtcatgacgccggctgattatcggattgaggtgcactgatggtcaccctccattcaactcaggaggcgttggatgctgatccttgctctgtttgcagcaagctcggctggacgggcatttcgacaatctcgccggtcggggcaagcccctagccctgcatcacggctcgacctcgaacccgtacatcggtcgacacgagttcttcatgtacgtctttcggcccagcatccctttgactgcagtggttgacgtctcttgctgtttgctgccgacgatgccctgcaggaaccaggcgttcaagaagaacgacgtccttccgccttggatcgagagccgcaagcagcatacggccgcgctcgagacgctccacacctcgctcgcagcgatgcttcatcgccggcttctgattcatccggacctaccgcgctttgcgtcgcttggtcagatcgagcgtctgcgcgtgcgcgaggtcgagcccggcgggtccgagcacagcttctggctcgacatggtcatgaacgtcaacagcaaaggtcgcagcgcggacggcatcggcccaccttcgactcgcaaggggtgcgtctctgaccgccattcacgcgctgttggcgttctgacgctgacgagatgagctacgctcccccttcttgcagtacgacgacgctcgcgactgagctcgagcgggcctatccgaaggcggcccaaatggcgcactcgtccatccacgcgcctccgcccgcgccagccgagatcaacaagattgacacgagcaaaatcaattggggcatggactggtcgttcctcgaggcgtttgcgctctatcgctggtgggccggcttgcgtgcgccctggaagcaatcgccgtgaggctctaatatatctagatgctgcatctccggggcgaaccaaatcaaccagctcggtaggtagcatcggcgctaaagggcccccgcgccagcacgacgaagccgggtttggagaaggcagccagggcagaagggcggagagggcgcgcgagggagaagaggcagagcgaagcgaccttctctttcccccaaccctcacacacgccttccgtcccatccagccctcagtgaccgtcgctcggcatccaaagcagtctcgcacggcccgacgcccagtccctcagccccgactcgcctcttgctcgcgcgcgcgcgccccgggatcgaccgaccttccgaggaaacgggccctctctgctcgctcgagacgccgccagctcagtcgcgaggcgcacacgcccgccgcccgcaagaggcatctatggggcggattgaatcaacctgctcgatagacaattggtgagccgccaacgcaagcgagcagaggtgggcggcccagtgcccgctgatgcgtttcagccagcccctttttcccttttgttctccgtcggccaggagcggcaagcgcgctgggccgcttgcggggcccggccgaccgcgttcccttcgatggcggagccgcccttttcacctacttgcctgagctcggccaagggcgtctgcagctcttcgcctgctgacgatcatcctctcgccccccctcagtcggctctcttcttccctttcccccaccaccccttcctcctgcgccacctaccacttcatccagccgccctcccatgtccttcccttcccttaacgctcggtcggccgctcttccacctccagcgaccccaccgcggaaccgaccccgcttcctctcgcacttgagcctctcacggtctaagtcgagtgacggcgacgccgagttgccgctcatgacgatccccgactcgccacactctcactttggggtacgccctagccatcagcccgagcagccaccagctgagagttcctcgctctggcgccgactgtcgcgctcctctaccatcggctcgagcaaccgcggccatggtcgctcggcttcggtcgtcccaccgcccagctgcgcctcgtcgccagcctccgtccggctgtccgaccaatacatcttccgatcagcctcgtcggacggcgtcccccaggcaagcatctcacgccagcgtctcagctcggagcccatcgttcctccacggccgcccagaacgttcagcctgcgtccgccgccttgcccgctgccagcgcggccaacattcgtgccggcgctccttcccgcccgtccaccgccaccccggcctgagccaacgcccccggccgaagtcttcacagccgtcctcttgtcgcaaaaaatggtcacgcttcctcctcagccgccttcggtcgcagccgcaacaccaacgcctggcacgctcgtccagctttcagtcgctggatcgaccttcatcatcccgctcgcctcgatcgaatgctacccctcgcaccttgcccgcttcgcgactggctgcactaccatggccgacgcggtcgaggacgtgatggagagcgacggcaccttcagctcggtcgacgagtcggaccgcgacttcgaccctccctcgcctcaggccagcgacttgtcggccgacctgtgagtcgttggaatcgtcgaaggtgttctgcctgttacaaaacttaccgttacgtctatcttgcgcgactacagggacatcccgacgtcgcctccctcgccgccattcaacctgcgcgcctcctctcaggcaaagctccacaaactcggcttgttgccttctagagacccgtcgacgggcttcctgatcgacccgacaacaccccggccagactttacggccttcccccgcatcgagtcgactaggtcggcaaaatctgcgctccgccggccatctggacggccagccgccgcatcaagccggtcgatgatccgatttctgaacgtcctcctcttccgctcgcccgacccgtacgctggaatcgcctacttctacgcgcacggcacccttctcccgtcgctccggacgatcctcgaaggcgagacggcctgcaagggctgcccgctctgcggcgacgccgagcggctccgacgtctgcgcgaggtcgaggtcgaggccgactttcttggcctggaggggctcgctcggctctgtcgacgtgagcggctcggccaggagggcgggccgtcggctcggccgtcagtgtcacgcaaaggtcccggctggatctaagccctaccatcctgtactcgcggcgccttgtcatctgttctcttctgtctctcatgatcttccccttctccatcgacggccggctgacaacgaggcacgggtattcaaaaggggtcatcacggtctggacagcgaaacagaaggttaaagaaaggggagagtctgcaagccgaggcaggacgggcaaacgagggagagggaggagggcgaagggggtgtcggtcgggcacgagctctctcggggcgggagcaggagagcgccaccgccctgcagcgatgacgggaggacgacggagagggcggacgggagcgaggtcttttccttgacgtccggccgatttaggtccggcgcttgaggttggtgctgagctagtgtcgtgcaaggcgagtaaaggcgcgcaggtcagtcgctgacgttcatctcgcgcaagttagccaccaacgcgacacgcacccattcgagaccctcgtagaggccgtcacccgacgtggcgcacgtggcctggatgtaccaggtccgctggcggagcgagtggaggccgagcttgtcggtgatctcggcggcgttcatggcgttgggcagatcctgcttgttggcaaagacaaggaggagagcgtcccggagctcgtcctcgttcagcatgcggccgactgaggtcgatcgagaggtcgatcgacaaggcgaatgtcagcagagagcatcgaccggagggcagaggggttgaaggagcaggcacgcacgctcctcgcgggcctccgaaacacgctcccggtcgttcgagtcgacgacgaagatgatgccctgggtgttctggaagtctgtgggatcggagcgcgggtcagacggtcagtgctcgtgctcaaaaagaccgctgacaagaggtcgggaggcggacgtacagtgccgccagagggggcgaatcttgtcctgtcctccaacatcccagacggtgaacgagatgttcttgtactcgacagtctcgacgttgaagcctggagaagtgcaggcaatgtcagtcgctgcgtgcgatggaggaaggcagccaaagggcaggacaaaccgatggtcgggatggtggtgacaatctctccaagcttcagcctagaggtaaacgcgtcgtccaaagggtcagcaacgggttcgagatggcggctgtcgaacgagggtcgagtggctcggcactgacttgtagctgtaggacgataagagatggagagagagagtcagtccaggtcgttcggcaggtcgcgagacgcgtgagatgggacgagggctcgcgaccgagagagtggaggactgacaggatggtggtctttccggcggcgtcaagtccgaccatcaggatgcctgccaagattgagcgtcaccagcaggaagtcagccaaccagtcctgtagaaagacgactcgtgacggcgatgcgaccggttccagaggcgacgcggcggtggcgaggcgaggcgcgaccggtcacccctccatactccctccgacggccgccaagctgtgtgccagtcggtcctcgaaaggaacgagccgcgcccgcgttgacgccgacgcagggagcattctggcgggcccgaagggacaatgctgccggttgctgccagcccatcgctcgccctcgcctaggccagcaagcgggccgccgcccgccggccgttttcctcgctcagccctcgccagccgggccatccagccgagccgacgcgcctcaagcttagctgaacgcgtgtcgacctggacggccggatagcctcgcttgagtaggcgcccgagggacgctcgacaggagaggcaggccgggccgatgtgtttttctcggaggcgagggcgagcgaaggaaggagccgtgggcgttgtctcgcccgcgctcggcccagcgggaacggctggttctccgcgagagaaaagagggaagcgacgcacgcatttccttcttgccgaagaggcccgagaggagcttggagatagagagacccatggctggctgaaagaggttgaggaaggaggagagggtacggtgtgggaggtcgaggtggctgggcaggcgaccgctgcgatgcgagagagccctcgcccagccagcgcgcgcgcgtcgcccccgttttttccgcggcgcgggcgagcgaccgagggcacgcgcgcccgcgccgccgccggccacacgactgaccgactgacggctcacgcaacactttcgctcgacgactcgcagggcagaggggtgaggtcgtcatggtacaactcggaggagaaacgcgcgcgagtactagcgagccgacacgggagagcgcttcgacaccaggagctacggcgagagggagggaagagggaaaggggaggcgagggcatgatcgtgaaggatggcacacagagaaggcactcgaacgctcagagcgggcccttgttggtgagattgacgtggacggccttgacgttggtgtagttgtgaagggcgtactcgccgagctcgcggccgatacccgacgtcttgtagccgccgaacggcacctgggtgtggagctagtcgtgcgcagaaggcccgctaagtcagcgctagtcgtcatccccgaggtcaatatggacaaaggcttaccgcattgtactgggtcccgaagcagacgacacaaagtcgggtccgagttcggcgtggaacaaaaagcaaacagaagagaaagtcacgatgggtcagacaaaaaggagccaggtgaggcagactccgcagccaaccacagtcccatacggtatcgcattgagacgtgaaccaaaggacccacctggttgacccaaacagtacctgagtggatcttgtgtgcaaccgagatggcacgggtgatctgaggcggggagggcgggagcgtcagccgggctgcccagagcgcagctggaaaagaagaacacgacacgcacgtccttcgagaagacggccgaggcgaggccgtactcgctcgagttagcctgggcaatgacgtcggcctcgtccttgaaggtggcgacgacgaggaccgggccaaagatctcctccttgagaatcttcatctcaggcttgacgtccgagaagagcgtcggctggataaagtagccctcgtcgccgtggcgctcaccaccgacgaggagggtcgcgccctcatccttgccagactggatgtaggccgaaatccggtcaaactgcgtctgcgagacctgggggccctggaaggtcgtctttttggcggggtcgccgacctggatctccttgaacttggcgacgagcttctcaaggaactggtccttgatgctctcctggaggtagagccgcgagccggcgcagcacgtttggccggcgttgaagttgatgccgaaagcggcccagctgacggcctggtcgaggtcggcgtcgtcaaagacgatgttgggcgacttaccgccgagctcgagcgtgacattcttgaggttggactcggctgcgagcttcatgatcgtccggccgacgagggtcgagccggtaaaggcgaccttgaggatcttctggtggctcgcaatggcggcgccgacctcggcgccgtagccattgacctattcaaaagcgagacggtcagccgttgcgactcaaggcatgatttgcggcacggacgcacgaggttgaagacacccttcggaacgccggcctcgttcatgagcgaggtgacgcggagggcggtgagcggcgtgagctccgagggcttcatgacgatcgtgttgccggtcgcgagcgccggggcgatcttccaagcgaacctgagagtaagaagcagaggtcagtcgagcggtgatagcagcggagaagaggaggacagggcgaacatgagaattgggaagttctgtaaggggtcagagggctgtcagcgctggggactctcactcgccgcacgtctcacctcaggcagggacgcacccaggggatgatctggccgacaacgccgatgggctcgtgccgggtgtacctgtaaggccggcgaaagatcgtcagccgagtctcaacagaaagagagctgccggcaacgtccactcacgcaaacttggagtcgtcgacctcgataaccttgccgccgtccttgtcggcccagccggcgtagtagcgcaggcaggcggccgcctcggagacgtcaaaggcccgggcgattgagtaggccttgccgttgtcgagcgactcgagcgcggcgagctcgtcggcgttctcgtcaatcaaggccgcgagcctctggagaatgacgcctcgggcgtggccggcgaccttctctccccagcgctcagtgtaggcctcctcggcggcagcgacggcgaggtcgacgtccttcttgcttccggccgagaacgacgtgatgaccttgccggtcgttgggttgatcgtgctggcagacgagaagagatggcggtaagcccaggcccggagaaggaaagggggtccccggtccgcctgttcatcacacgcaggattgcacgaagaacgtactcgatagtcttgccatcggcgctgtcaacccactggaggagacacgcaaagaaccatcagtcttcatctctgctccgctcggagcgtcggcggaacgatgagacgaaagacggacctcgccgttgatgaagaggccggtgctgaagctcgtcttgcccttgtacgagtcgtggtcaaacgtgtgctcaaaggtcttgggcatggtggatagagtagtaaggggaagtaggggtagggtgtggtgggtaggtggtggtgggtaaagggagagaaggagatgcgcttcaaagcaaggtcacaggccgccctccctcgtcggaaactcggggacgcactacgccggcctcttggccccggcggcggcgcggtcctctcccggcctcgcccgaggccccgtgtgcgcttccagccgttgcccctgatatcctcgccactcaaaagtgacaaacgcaacgaagacagctggcgtagtagtaagcaagatgagagagatgcaagctcgcgctgcgacaagaaacgacatttgggacgaggcaaggcggccgctcagaggtagatcggctgcgccagagatggaaaaggtggaggggggtcagcaagcgcacaacagaggccgccgccgcccggcctctcaaaggcgcgttcatgcctcggtcgccctagcagcagagcacgagacgtggcggcggccagcgcgaatggtcgcatgaggggacgtacgagcgtcacgcggttgacctcgacaatgttgccaaagtcgacgagcgagctctcgcctgcaaggggaagggagggaggagagggtcagcaggagtcaagaggcagtcgacgcgaacgcgctcacccttgaggaattctgcgcagccaagaaggagggaaggcgtcagtaagcggcagatacgagctagagagagagcatcacgcaccgatgggcatcgtgacgaggtggcccttgacctggctcagcttctttttcacgaccgagagcggcatgtcggggtcggcgacgtggcccgtctgttgcagcagaggatggtcggtcagcgaggtctgcgcagttctgaagacagtgagcacggccgcaccttgatgccctgcggagaggctttcttgtagtcggcccaagtctggaccgagtcgtgaggcagtgtcttgaacacctgccgcaccgaggggaaaagggggagagtcagttcgctgcccgtcaagccgtgatacgagaagaaccgcacctcggtgaagatctcccggttcttcgaggcccggccctcccagagctggaggaagtcgtcgctgagcgggtccgagacctgcttgtcggcatccgtcccaaaaaagtcctcgtgctcgtgcggcgccggcgtcatcgccggcttggggttctcgccaaaggggtgcgtgccctgcggcggcaggaggccgaggtgctctttcatcagctgcgatggttgagcgcaggaagaaaggcgggtcagcgttgacggcccttgcctgagtcgggaactggacactggacgcacctgatgccgccactgcttggcaaagcgtgcggcgaggtaaggcttgccgtccatctcgcactcgatcatatcggtgtcctcgacctggcggcgggggagagcaggatcggcctcgtcagtcaacagccacgacctcgagcgcgatcgtcttagactaacaacgagcgcaatttcagagtcgccgtcgcccttctgcgagcggtcgttgaggtctacaaatacggtgtcagcccatcagcactggaccagctactcggcagagattgctgacgcttgacgtactggccgagccgcagatgacgcgtcggtcatcgacaatcatgatctgagggaaaaacgaaagtgggcgtcagcttcggcacagagtatgattccagctacaagcgcgaccgagtctgaccttcgagtggatgtaggtcagctcggtgacgtaggcttcgcgctcctcctcctcggtgcccatccacttctcgtcgagcactgcggagcgaatgatgcgtgcgtcagtctcaggacgacaatggcgggcacagggcgaggggttatgacgcacgcgcggtcttgtcagcctgcgagtgctggccgacgttgtcggcgacaatctcatcaggccggtcggcgcccgcctcgaagcgccgaatgagctcctcggcctccttcatcgtcttgggcaccttcacgtcctttagcgtgtcacctgaagtcggaagccgagcagtgagtcagcgagggtggaaagcagtcttgcgattcgagtcggcgcacccttgtcggctgcctcgagctgatcgaccgtgccggcctcgtcctcggcctaagtgagatgaagcgctgacggtcagccaaatggcctctggagccagcctctgtcgaggccggaacgcaccgtcttgatgtcgaccgtctcgacctccttgctctcgccgacatcgacgccgccgacccagaccttggcgagcgcaacctgagcctcgtggaagttgacgcccgagcgctcttccatctttttgatgaagctcgcgggcgcgttgatgcggtcgtagctgcggaggttgtaccatcggatgtactctttcgggtcgacgccctcacgctcaatggcctcctgttggggaaacgactcggtcgaggtcagaatgcaggcactgctaagttgccggagagcacgttccgtaccatgatcgactggccgccccgattgatgctctggtactgcgcgctcatgatctggaaaggttacagggtcagcaatgcgcgagaaatgtaaacgagctcagtcgtgactcactgcctgcagcgcagcgaaggttaagggagagtcaatacgccaggcgtcagttggcagcgcatgcgaaagcaggaacatccttcgtcgcaccttgagaccgccctgtgccgaaaggtcgcctgggaaggccggcatctctggaatgacgatgatcatctgcggcccgtcggtcgagatcagtcactatctctcaaagaaaacgcgctgggtttgcgcaccttaaacttggtgcccgaccgggcagcactgaggatccgctggacgatggcgcggccgactgcgagtgagtcgcacgaacggatgtcagccggtgggcacgcaaagggattgtgcgacgagggcactgactcaggttctgaaccgtgtggccctcctcggtctgggtctgttgataagagagtcggtcgtgcatgtcagccagagaatggtcgacacggtgtcgaggctgactcacgatccaaaactgtcatcgtaggggcaagcgcggagggttagcttcgatcgactgtgcgtgacaacaggcgtgcaccaacctggttctcgaggtaagcgcaatgcgactggagaagatggaaggccctttatcagcgcctgaccatgtagtgggcaagggcaggcagctcgggacctaccgcctgtgaagaaaggagagcagagtcaccgcggtcagccattcgccttcgcttcggctcgactaagacgcacctcgaggatcatctgcgcgtaagcgcgctggatgctgtcctccttgaggatgcctgcccgacccaaaacagcgacctgtcaacttgcagcctcgatgaagataatgtcgacggcagcgcaccgtgcgaccagtcagcagagctccggacggcctggacgcggcacgagccctgaggaacctcctcctcggcccgcggctctttcgacgggtgctcgtggtacgggtggaagtgcgcgcggccccgatcgagccagtcctgcaggtgaggatgctcgcgccggcgttcgtcgcgcatggcggcgtcgaggccgtcttcctgagaagccgccgccgagttttgcaccgtcgagctgccgccactcggcagggtattgattgttgcttggaaagctgtgatgtgatttgccagccacgctcaagggcgtcagtgcgaagttcttgggcgcacgattgagcgagaaatgaggagcgcacgatgcggaagcgcgagccactcgtagcgctcgttgtgcttgtacttgaggtgcttgacaaagttccacctggcgaacgaggcggtcagtgccggcctcgatcagctgcaaaagaggattgcgcaccgctcaacaaaatgctgctggaggtcgacgacgacgggaccctgcagcgtcatgctggtgtcgtgccacggcatgcgtgtgacctgcggcaggaaagcaagttggatgcgtcagccgagcgctgcgaccggtcctaagatggaggggcgtacggtcgccgtgtcgacggcgttggccgtgaacttgtcgacggcctggaagtcgaggacgcgggcgttgttgtagtcctggcctgcgggacaagatgaaaagctcgataatcaatcaatgccttgtaacgacctccatcttgtggctccaccgcaccagggaagagcgtccggtcaaagtgcgtcgggtggacgtcggccagcgggtggtcgtgcaggtcccagcggccgaagcagaggtcgagcccgccaacggtcgcccgggtcgagtcgacgatcgtcattttttcgtgatgcgaccagtagagcgtctgctcgccgccgaggtggtccgggtggcgcatgacggcaatgttctcgtgcatctcctcgagctcatgcttcgtgtgcgaagacgacatgctcatcgtctggcggacgaggcgacacggtcgtcagaatgcagacatataagcgatacgtcgttcttcgagcagacgcacctgagtgacctccttgtagacacagatatagatcttgacgccctcctcggcctttcgcttgagcagccggtcgagccggtattcgggatactgggccggcggccggcgaaggtagagctctgggctaagccaccagtcgaggatcatgatgctcgtcttggcctcctcgagctggaggggataagagtgggcgtcgtttatcagcgagcggagctcatcaggatggcgcagggctgcgcaccatgatcgagacggcccagaagaagtcgtggccgtcgacgtgcgaacggacgatgctgaaggagcgccagaaggctagaatcagcctagagctcaatctactaagatcaaacgaggtcacgcacgctcccgaggtctccggggcaaagctgcgagcggaggtcgagcgtagtcgatcagcgttccgtctcaggtcggattggaggacgagacagcgaagccgagacggaggcgaacgtacctgttaaagcggtgcgagtcgcggatagcctggatctgccggtcgacctcctgatagggcaggcgcaactacgtcgtcagcatctgacgcatgagcctcagccctgggcgagcggaccttctcgtgctcctcgtcatgccggtggttcgggttgatcgtcgtccggatctgctgcttgattcctctgcgtcgaccggtcaggtcagcatgtcgccccatttatattcaggtagatttgcgacgtacctgatgtgatccgcgtctggacagaggaggcagggcagcagccggtcagctcatcgtcagctgcggaagggcgaagccgggccgagctcaaccgagctgagaagggaaccgacgaaccaaagatctgagcagcaaataaggaggttttgggtgttagcggaccatcacatactgactgtgggcagtcggagtgactcacccttgccttgtgcttgagcctgatggcagaaagaggcacgggcgcgaaggagcgtgtcagaccgacgccgcagcaaggggctcggccatcgcagagctgcgaactgacgaatcgccgaggttgtccatcttgtccttaaagcgcgacatgctgcacgggctcaaaacgaagagtgtctgagaagcgttggagtaggggcgagaggacagagggggtgatggtcagaggcgtgccgaatataagtcggcggccttgctctggttcgtcgtctgaggcgcgcctgcgcaggccgccctgcggtaggtgacgcccacgcctgtcgagcggccttgctcgactcctgagcagcagtctctcgagtgagggatcgtcacgcgcactgcataggcacatgctcgacctgccgtcctcggcatgcagccgctcgagactcgtctcccggcgaagcacggcctgaatctcgtctgacttagcgttatatatacgctgcttttggtcgactttaccacaggcttacggcctgaagcagatatagccaagtggttacggcgcctgacttgaactagttcatctcatcaggtcctctctgagggcgtaggttcgaaccctgctatctgcgactatcgttttgcccacccaagcgacgcatcttcacctgtttcctcagatgacacgacttccgcatgcgagagacaaatcgtgtgtacgggagagcccgcagactggctcaaaagcttcgtctcgcaagaaaaaggcaagcaccggtcggtcgactcagccacgccgtcggcagcgcgcgacctccttcgcctcgacgccttccgtgaaccggctcccgaccaccatcactccagccgtctcagaccctcaaacgacccattttgcccgtcatgggcattaactacctcctgctcgtctcgcgccaaggtgcgtcccgagctgcggtcttggcccgggagcagcgtcgctgatcgtgagctgctgtctctcgccctcgcctcgccgccgccccgcaggcaaggtcagactggcaaagtggtaccagacgctgccacccaagaacaagaacaagattgtcaaggatgttacccagctcgttctcgcacgccggacgcgcatgtccaacatcctcgagtacaagggtgcgtcttgctgccattgcaggcttgagggctctgaggttggctcggacgcggctgcgagatgaaggccagtcggagcgaccgtttccggagagctccctgcaagctcttggcgaggcgacgactgccgaggcctgtcagacagattgctgacctgtcgtttgagtgcctcgctacaggcgacaaggtcgtctaccgacgctacgcctcgctcttcttcgtcgctggcatcgcgccaggcgacaacgagctcgcgacgctcgagatcattcaccgctacgtcgaggtcctcgaccgctactttggcaacgtgagcaatcgcccctactttgtgccggccggttcgaaaacggtctccccttgcgctgcaaggtgtagctgaccctcccgcgaacgacgcgccaactctaggtctgcgagctcgacctcatcttcaacttccagaaggcgtatgctgtgcgtctacggcgttcttcccgagtcctccctgtcgctttacgctgactgggccgcctgctgcagatcctcgacgagctcatcatcgccggcgagctgcaagagagctcaaagaagagcgtgctccgcgtcgtgcgtcgtacgagctcgatctccgcaactccgccttggctgacgactgacgctctggccctcgtctcctgctcaggtcgcccaatccgacacattagaggaggcggaaaattcgtgcgtcgcgcagctctgaccgcccgttcgcctcgcgggctgcgacgtcctcttgctgacctcgacgctgtaatcgacagggaggactcgctagcccgactggggtcgctcgctcggggctagacgtctggcgcgccagcggccaatctgtactacgtatctctcatgaacctcacgaagcccggccgctccctgggaagtctcttgcagccttagactggcgtagacggctcgcgacgcccattcgctctgctgagccccggtctgcctcgccgggagccattcaaacatgcagctgtctgagtgacgcagcgatagagaagagaacagagtcctgccgaagtcgaccgtctcctcagtacggagcaaaaccagccactccgtcgaaccttgcacccagtcctccccttgctctgccctataagatgtgcatgtccatctgctcgctgcctgcgagctcatcagttggccgcctcggcctcggccgccttctgctcgctagcggcctcggcgagctcgtcgtcaaatgtcttgacctcctcggccgcctccgggctctccttgacggccgcgaggtcggacgggagcgacttgtgcgcctcgggcgcatcgttggcgacgtcgccgttggccggcgtcgggtcgggctcggtcgcgccgagcgtctcaacctggacggggggcgcggcctcctcgtcggcgtcggcggtcgcgtcgttgctcgtcttggactcgagccggcggatctcctctgcgaaggaatcacgtcgtcagcattgagcacccgaggaaagctgtcgatcggagagaacgcactctcggccttctcgaggttcatgcgcgtctggcggtcgttgttggcctcgaaccaggccttcttggtccggagatcctcgaccgcgcgcgggacatcggcgttggacgtcggcagcgggatcgagagctccatgatggcccgcatgatgtgcagcggtagctggaacttagtctcggccttctcgacgacgggcggcgtcgccgtcccctccgacgacgccgccggggcagcagcgaccttcttcttctgctgcgagcccttcttctttccgccgccgccgaagaagacctcgtcgtcggcgccctttttcttgatggcgacaagcgacgcgtcctcgtcgaccgcccgagcctggcgcgactcgatgccctcgatcgccttcttctgctggagcgagctctggccggccgaaggcgccgaccggtcgcccgtcaggtggtcgatgatcgtctggcagtcctcaatctgcgactggtaggccggcgtcttggcctcctcgcggagctgggtcgcaatctcgagccgcttggcgtcctcggccgccttgcggtcggccttgaacttgtcggccttgcgggcgcgctccctgcgagataagcgggcgggtccggtcagacaaggtcagccacccgaagcaaggggacaagcagaagcgaaggcgatggggacgcactcctggaccttctgccagtagacgtcctgggcctccttgtacttggccgagccctccttgcggcgcgtgtgggcctcgtcgagcttggccgaaatctcgcggcgctcgtcgtagagcttgttgcgctgctcgtaaagcttgtcgccctccttctggagctcgccgagctcggccttgatgccgtcaaacttgtcgctcgccgccttgagcgccgggtcgtcgagctcggccgagagcgcatcagccttggccttgtcgtcgtcgatcgactgctggacggccgagaacgactcgacatttttgcgcgagcgtttgagcgacgaaatctcggagagcgtccgcttctcgttggcgatcgtcatcgagcccgactcgacttgcttctcaagcgacctagcacgcagaggggggcatcagtcgaccgatctcaaggcagcagggagggggcggtggcgacagacttgatgcgctcgtcgacctcctcgacattcttgaagggcagcttggccttggcagcgttgagatccttgacctattcaagtggcgaaagaggggacgtaaagtcagccacgggccgccgggcgcgcgccaagagtcaaagggaaggaaggggcgcaaagaccgcctccccccctcctcagctcgcccagaacaagcagccacggaccttcttggcaatgtcgtcccggagacgcttgaggtcgtcaaagatctttgaccgcttctgcttggcatcgccctggaccgaacgcagggcgtcgagctcggccttgagctggttgcgccggctcgtctcggggttggcagagccgttggacgagttggtcgcgagcgcaatcttgttcttgacctcgttctggaggcagcggtgggaaggcgagggccgtcagcggtgaagtctctcgtcggagagactgacaagaggaaagcagcaaggtccaattgacatctcgcccgggccgcggccctcgcttgcttgccagctcagccgctggtgtccctcgccggccacctctggcccgtcgaggaagaggtcaaacgtacgagctgagcctggaggccatcaatctcggcccggacggcgtcctgctccgacttgaactgctgctggtcgggcttggggacgaggtccttcttctcggcctttgcgccggcgggggcggccgaggaggcggcggcgggggcggcggccttcttggacggcggaggagccatggcgagagacgagggcgacgacgacggagagagtgtaggttggagagagaccgggagagggtgctgcgatgggagggagggcaaggaaagatggtcgtctggagggctcaaagggtcctctcggccggccatctggtctctctgcgcggccgaggcccaatgtcggcaaccaacgaacgactcgacccgacggccatctcgcaacgtcacccgaaagcatggacatcgatcggccggccgcctcctgctccgccgtagacggtcggccgctccgcctcctcctccacgagacggtcgtcggccggccgtcgccgccggcaagcttcctcgcgaccgtccggctccgtcggccctccgccgtcacgaccgtcgtcgtggtcccggccggcgagccagcgttcgagcatgcgactgtcgagggctacgggtacgtctgcagaccgtcttcccttctcgcctcactcggccgctcgagcgggatcctgacggctcggccccgtcctcctccccctcccttccgcgcagctcgacgccccgcacagcaacctccatcgacctcctcttcaatgttcgctacgccccgccagccatcgcgcccctatcgagccgggccaataagcttcagaaggtcgtgcttgactaccgacccgatgcggtcgacggccgaggccggtcgggcggccaggcgttcgcgctcgacatgccggacggggttcgtcttgcgttccccccccccctccggccctgctcgcgctgacccgactcggttgcaggtgtcaacgaatctcctgctgtttcgcagctcgctgccgatcctcaccgtcctcatctacggccggccgacgggccctgcgatcgctccaggcccgcccctgcccgagcccgactggtcgacgtacgttcgagtgctcactgaaggagagggcggcgctcgagcggccgatgacaccatattcggcctggcgattaccgatgcgcggctgccgttcgttcgtgccctggctctgctcggcgctagacgtccagaagctcagcctggagagtccgacccggccgacggcccaggcgtccacgccggcggcagcagcagtatccttcaaggccgattgcacgaggtcgtcgacacgcttctccaaggcggcaagcagctgaccgcccggctcaagaagcaggtcgagcgccaaggcaatgctatgcagatcgacgacgacgcccccgaaccagcggcgacgcgcgacgacctagtcccggccctccagctcgcgctcgagcatctcatcgagctcctcgactttgcccgtttcgcgacgctcgagatcgtcctgccttcgaacgcagccgagctcggcctcctcgccgggctgctgctcgttgcctccgcggctgacggggctaaggcggaggctgcgcgcgggctgaccgctggcgtcgtcggtgcgctgtttgggcacgaggcggcgagggctgagatgacggcggcctttgcgtcggccgcagtggggccgtcgatggtcgacttcaagacgcttgtggcagctggttctgtctgggacctcaccctgtgggctgtggcgctcgacgtcgagccaacaaagacggcgcacttgtcccgagccgaccgggcgtccttcaccagcctcttctactcgctagcggcaagggcgacgaacccgacagcgggtccgcggccaccgatggcctccccgccgacgccggccgctttgctcacttatctgaccgcgtcgatccagatcgcttctgccgtcgaggtcgttaccagcactgggcgacgggccgagactttcccgacaagatcacttgcaaggcttgaggaggaagggcagttgcggctaacgctcgacgcactgcggctctggagcgcggatcccgtctctgcagcggtgaatcttttccctcaagcctttcgccactgaccggccctttgctgacaacttcccgttacacctctctagcttctccgcaccacagtcgctcagccatcaaccctgttggcggtctgccacctgaccgcccatccagacgacgaaacctcggcatctgcggtcgccctgctcaacggcgttctggccgacgcggcaagtgcacccgccctgtcggccgccctaatcaagctgccttcagctatactggagcgtctcctcgacctcgtcggccccgatgcgagacttcagatcgaggtcgctcgcctgtgcgcatacccggcgcagatcctgcccactctccggcaactcgcagcgtctgccctcgagagcgagctcggtgtggacgacatgtttgaactcgagctttggctccatcacctcggccgacagcgccaggaaacaacggcgaccgacgacgcggccgtcgcttcgaccttgctggaggtcgagggtcgactggcccgcgcgcaacgggcgcttctcgcacaggatacgtcttttgcgcgggatcggcacgacaacctcgaccgggccggagccctcctctcgctcgctcgaatgagcgcgctcgtctttagcctgctcggaccgaccctgcaggcgccgtcttcatggggcagctcctcgtccgagagggccctgcggtcaagctttgtccggcaggcgacggccagcgcagcccgggcgctcggcgtcggttcgtacgtcgccagccgcgccttcctcgacgccttctgcccgactccgctccagccggcgctcagtgcggcagtcgccgagcaggcgcttgtcgtccgactccttgtcgagcatccggccgagcacgacaacgaactggacgggccgagcatgttcgacacgatcctccagggcttgctcgacgctgcattggcggatccggctgtcgttgcgtctccggcggtaaccctcctcctttccatctggccccgagcggagcgtcatacggtcatgagggcgatgatgaagcatgagggtgagcttgatcagctgtcgattttccttgccgacgacctccggtcggcactcgacgaacgcaggcgtgacatgcctcgcgacccagacttgtcgccgccgtccctcgcggccgcgatctcggcgctcgaggcgctcgaccgacatgcaccgcccatctcgtcagctgccgaccctctaatcgtctcctcgcacgacctcctctcctggctgcacccctcgcatggcgcactcgacggccccatcgccaaggacggtcggccctcctcggcttcgccgcagaaattgccgtttgccctctcctccgccagcccgccgacgacaaagacgtactcgaagcaggagtttcgcgcgccgcggacgatccccggcgcagggggtgggctcgtccgcgtcggaaacgtctcgcgtgcgccgagcagggtgcggcagatcgtgctcgttccattcttgccggcgactcgactgacgtttgacgcttgcgaaccccttacttgcagcacgtggacgactttgagagcttccaggcgaccacgccgagtcccttgcctgcgccacccgtcctcatcttccgcaaggatgtctgatgtctttctcattcatctgcgagctgggatcgaaggacaagcatggagacacggaggcggcagcaggagagttggcagcacaagagtcgagtaagagcgcgagagggaggaagggaggttgtacaacaggcgaacgagtgtcagaagcagcgaagaagggagggagggtagcagaatgcgacgatggtgaggagggaggggcatgtgtgggtggtggtacattggatggaggagtttgtggggcatgcagcaggaacgaccgagggtcggcactcagagaccgagaggcggcagggccgtccacgtccggttcgttggcgtcttctcgccttcgtcgagctcgccgtcaagcagcctgctgtagcccgtgtagaagttcgaggcgccctctccgccaccgggcggagggctcggcgcgagcgcgatcggccggaggacgggtgagtcggccggcgtgtgcggcggggggtcggtccggcccgaggtgaagaagggcgacgaggcgagcgggtcggagcggagcgaaggggcgtcctgctccttaatcgacggatggagcgagggcgacaggcgcggaacctcgagaatcgagccctgttgcatgcaggacaaaaaacgtcagtccaaagcacattagggtcgcatccgatattgtcccgactggaagcgtgacgcacctcatcctcggctgtccagacgcgccgtccccagttctcacgcacgcggtcgagctcctcctcggtcgagccgctgctttgaagaccgacatggacgaggtcgccggttcggacaagtgcacggacgagcgcctggcgggcaacctccttggcctgggcatagtcgccgtcgcggagggcgtggccgcgcgcgcgagagaggagggtgtggatgctgtcctgggcgtagcggacgctatttgggagtcgagagatgggggaggtcagtgactggcgggccgccggagaaacgtgggcggcggcgagagagggcaaagcgcagcgcaccagcaggtgaggacctcatcgccgccctcgggctggatcatccagggcgcccacccgggcgagccgagcagacggtactcgtcgcaaaggtaccgccggacggcaccaaaggcggcggcgagcccgatctcgcgcgcggtcgtcgcgtctgggatgagcgtctcgtttgcgagcttgaggtgggtggggaggccggagttccttcgagtcagcctcaaattcgccgtccgttgccgccggcagttgccgttgactgctccgagcgagctggaggacaacgtacgttggtgaaggagatgagctcggccgacgacggcttgaaggcctgaccgaggagggcggcaaggaacgaggcctgctcggctgggctcgatggggcggcctccgtcatggttcggggttggacgagggcgacgcggcgagttggggagaggggcagagcgagtttgtgtccgggtcgagcgaggctgggctaaggaccgggtggcaggttgtaggttgggaggaatgtgcgagctggatctctagcgggtggggtgctcgtgacgatgtcgaggcgaagaagaaggggagcggggaggggagggttgtgggacggggcctttgtggcggtgcggctgcgtcgacgacggtcggagagagcgaaacgagtcagcttcagccctcggccggccctgtccgagaggccggcccagcatgtcgggaggagacgcagacagccgtcctcatcctgccgagacgcaagcgctctacccggtcgagcccgagcgagcgagcagagtcgagctggccgggtaggacgactcgagttgaccacgcccgagcttcagagaggcaaggtctcggcgaccgtcgggcgacggcacgatcctcgccaagctggcgtcggcggccgatctctcatgacgtctgaggcagctccttccctccaagaggaaggagccttgctgtgccatcgtctcgcttcctccgacaacgcctggctcgaggagctggcccgaccgaggaggaatgggctgaagcgcacggagggagtgagagcaggtgctgcgggccggcctgcgcctgccggctgctgctgcctccgtcaactcattcctgccatgatcttgtgcgtgccaaaaggacgacctggttatgtgcagtcactcctagaccgccgtgctacgatcggtgctggccttcctcctcttaagcgaggcaacggtagggagtcgagagagtcggcgagagggctggctcgggcgccggctcagccgcgccgacttgcgactgcgatgacccgcatgcggcccgacttggctgagagtctcgcctcgcttaccggccggtctttccttcccttccaccacccacccccatccccatagctgtttggtgacgagttccttacccttcgcacaaaggtatcgagctgctcgaggccgacatattctcggcctcgagcagctcgatacctttgtgcgaagggtaaggaactcgtcaccaaacagctatggggaggcagcagactgcaagaagacctcgcacctgctggtgcgcccttggtccggagctcgagcagctccttccccaatcgacgggacgagatgcttgccatgtcggtgagaatttggctgtcgtgatgcgttgctagatgctgaggatgaaggaaggaagcgagcgaggagggcgagatgggctgaggggagatgatgagagtcaggcgggaaggcgagaccctcctccgggcactcacgagctgtcgctggccaccaaccctcactccggtcctcgtctgcacctcgtcgcctccctctctctcgcctcgagcatgtcgtcaaaggcgttcccgcgcgatctttcgctgtcgaatgccaagtttgagacgtaccggctgacggccccgacggcatcgacccgggcgtacgacctgcccggcgcggccgtcactcaggctcgcgtccagcacggccggacgacgctatcagctcgtgaggtcagcagccggatcaggcacgaccacctccatgcctgctggaacgggtggctagggttcgtcgacgagagctgggagatctgggcggtaaagctcggccaggacgacctcgagccgacattcgcgtcgctgggctcgctcccgacgccgctcgataaggatgacgcgccgccgtcagagtacccgtcggtctgggcgctttcgccgacgacgtacgtctgcgccgatggctttggccgactctacccgctcctcgtccagccaggtgcgacgctcagcgcaaccctcggcccagcgtacgaactcaccgacagcacgtcgggcgagctccgtccattcaagatcgagtgggtcggcgccgaacgacgtctgctcgtctcggccgtccgccggacacgtgctgccgacggcggctggggcaaggaggagggctgggatctgttgctggttacgttcggtgacgactggtcggacggcctccgtggcgccgactcgtccgacgacagcgccggcgagatggccggccctcagccggactcgacggcggcccggacgctcgacgtcctatggagcctgcaaggtcccgacgcgccgttcctcgcgtacggtaatggctcgcgcctactgctcgcgtcgtctgagccgtacggcccggccgggtcgaatgcggcgccggcatccacggacgcggcctctacatcgtctgccgctgcagggccttccgccgagacgacccatctgccgcagcatcctttcacgtgggcccagtcgtcgacgtcggtcaccctccagacctctcttccgacctcaactgcacgggcgctcattcatccgacgatcggcactaagacgctctctatcctcgtcggcgaggcttcctcggctcagacgagcctcgagggcttcgtcaagcgcgcctggtgggactcggtcaaggccgacgaaagcttctgggagtgggacggcgagcaaggcttgctgacggtcgagctcgagaaggcgaacccgcagacgcggtggccgcacctgtttcttccatcggggacgacgccggactaccttgacgtccccgaggagctcgcgcccgacgaacgaaaggagatcgccgccgacctcgaccgcttcacggccgggctcgacctgcccgagtcggtccctggcgggattgcgagcatgatgcgcgaggagatggacatcgacgacgagggcgacgacgagggtctcgctaccgatggcgaggcccgcatcggcagagccgtccgatggacgtttgtcgatgccgctgctggcgccgggctgctcgagcagggcgccaagcctgcggcaatggtacttcagggctcagaggcgctcatcgcgaccgcactcgaatgggcgcagaacggctttgccaagccggacgatgcgctgcctccagtcctcgtcaagcactcggtaggtctcgtcgcggatcacctgattgcctggcacgcgaagtgacgccctcttacaccgacagctcgacgcgctgctctttgcgccgcccgcaagtccgccaacgaccagctttgcgcacgcaaagacgttcccggcgctcgcctttgtcctctcatccaagcggcagacgaagtatatcttgcactcggccatctcgtcgcccgcgaccgtcctcgcgttcagcacgccgacgaccgcctcggcccagggcgacctcttcgtgtaccgcgatgccgagggccggacgacggcgccgtcggcggttgtcaagcttggagggggcgaggacggcgagctgctcggcgttaaaggcgtcaagacgcgggcgggcaacgtcctggttgcgctttgcgagcggagactcgtcgtcgtcaaggacctcctgtgatgatgactttgagagcataatgcgacggcttccttcctgcgctaccagacgcacgaccggagaaagcgtaatccaatcagaaacaaacgactaagccagcctcggctctcgcccagccccgcgagcacagcgcggcacaagcaaaaccctacgaccccctgccgcgccctcctcagccgaggccaccccagggcccgcggattctccttgcgagctggatgtcgcgcgtcatgatggtcactcgccgggcgtggagcgctgaatgggtgcatggaggacgggagagaggtcagctgaggggagatgagcgctcgggaggaaggcggcgagagaagacgtaccgcagaggttgctgtgaagagccgaatccgatgagggcgcagcagatgcggagggaaggagatgaaggagagcaaagttagttcggctgaggacgcctcaacacccggggcgaggatgacgcgtcgcctacgcacgcgtcttcgaacaggtggacgaggtacgcctcggtggcttcctggagcgcgagcagggccgacgactgccagcgcatcggcgcatcatcgtcgaccgtcgtaaagtcaagtgccacctcccggacctgctcgtcagtgaatgcggatggaagcgaggcggagtcagcaggtagtagatgacagtcgcgaggcgcgagcgagcgagacgacgcacgacgcggctgaacggcagcttggcgatcaggaggtcagtcgagcgctggtacttgcggatctcccgcagggcgaccgtccctggccgatagcgatggggtttcgtcgctgtatgacgggcaggaagcggtcagcaggggaaggacgcgtcgtgttgactgaccccggagggagagggggagcctgcgcgctcgctctctccgaagctcgtgcgctctgaccctctcgccaccagctcccgcatccggactcaggcggacgcacctcgtgccttgcccttgcccggtccgctcttgctcggtcctgggccggccgcgctcgctgccttcgtcggcaggcccttgcgcggcgtcgtgtgggtcgacttgcggcgcgacgggccggcttgggtcgtgttggtcgccatctggaccgagcggaaagcaaagaagctgaaccagaagttaatggatcgtgagagatgcggcaagagggagagacctgggttgccgggtagctcggagatggtcagggaggcgctgtgggtagaggagcaagggagaagggtcgcgagggggcgacgacgcggctggtctaaggggctgctaagaaccccgattgggcatatgacaaaatcacgcgcgcgcggccaagcccgccgcttcccaatttcctctccactgccaacccgagctcccgccctctcctcataccccttctagcagcatgtcggcctccaaggcgtcctcgacaactaccaagaccaagcggagcaacgctgtcgcctcgtcctcggccggtccgagcaagaagaaggctcgcacgccgacggcggctccggctgcctcctcgagcagcagcaagcccgccgctgctgctgccgctgctgggcccgactcgtccttctcgtatcgcacgacgcgcatgcggctctcggtcccgccgcgattcacgggtgacctcaggcagggcgtcgaggagatgctcgactcgatggtcatgcggtgcgttccctccttcctcgctcatgttacggcccgctaccgcgagggacacctcgtctcgccttgctcgctcctctcggtcgttgcttggcctggctgggtcgaacagactatggcgcgcacgctgtagggcagtcagcgagaagcactttctggtcggcggcgcgatgggcaggccggcggtggcagcgggctgatccaggccgtgcctggccggctcgtacgcagcggctgagcgcgaggcctcaggttgaggtcggtcgcgtgacctacaagtcgcctagctcagggccgaaaaggaggtcgacgaggggttgtccttacaaaaggtcggcctcacaggttagctgtcagttccgcgacggctgtcacgcgagccaggagacagtcgaggcgcgccggacgaaggccgacaaggcaggaaacagggccgtctcgtactagcaggcccaactcctgagaggaattgaagggctatccaagcgagggcttggggtgggacgagatttggcgacactgaccctagcagagcatgctcgaccagcgactccgcgtcgtgcgcttgacccaggtctggttgactccctactgtgtcgccgcttcgcttcgcctacaccgtccgccttcgcttgctgcccggcataccaccatgcgcgcgcagcccattctgacctcctttcctcgccgcctacgtctcaggttcatccccaagctctctggcgtcctccttgcgcacagcgacctccgcttcctcgaggacaaggcgacgatccaggccgattgtccgttcgccgtcgtcgacgtccgctttggcgcgcttgtctgggcgcccgaagttggacaggtgctctgtgcgttatcctccctcttagggaccagccgaccctccgctgacgctcggccgatctcactcgcaccccagccggcacgcacgctctctcgtcgccgtcgcacctctcgctcctcatccaccagacgttcaatgtctcgatcccgctcaaccacatcccgccttcgctctatgcatttgaccgctcgctcgcctcgcacgaggacgaggaggccgaggttgagcaggcgatgctcggcgtcgagggcgaggccgaggacgatgcgcacgaggaggtcagcgtggagaagagcaaccggaaggcgcggcggcagaaggcgagcgagggcaggtggacgcatagcgcaaccggccgggctgtcggcgccgagagccagctcgtcgagttcactgtcgttgggtgcgtccttcttccttagtggaaagatccttgtgcggccagactgaagctgatctcggcctgttctccgttgcgcagcttgaccatcacgtccaatattctctctctcacgggctcgctcctggccgatccgttcaacccgcctgcgcccggcccgtcccagcctggagcgtccaccactgccgctttcggctcctactcggacgacgaggacgaggacgaggaggcggcccactcgctcgtcaagtcgaagcggcacgccgtcgttccgacccagaataccgcggccgtctctgcccgtcagacgcaggcccaggcgcacgcccaggacaagggcgcgccgaagatccagacaaccggcggcggtccgcaggcggcaccgacaaagacgcgcaagcgggccgtctcgctcgagttctcgtcgtcggacgatgacagcggagatgacgggccggtcggaccgacgactattgtcggcatcgacggcggcgtcccccagtcgggcaacgacattgacacgagtttcccgctgctgccggtcgggcagcgcggcgtgcggggcgcgactggcaactcgaagcttggaaagactgacgtccggccagcgccggtcgagtcggcttcggggagcgacgacgaggaggcgcccccggtcaagaagagcaagaaggagaagaaggccaagaaagaaaagaaggcggccgggcgcaagtagaggcttgcccttatgtctcttgatgctcttgccctatctttcaatcggcgtgagagtaagggggtcgtgcgaccacgaccacgtacagaagacaggcaggttaaggtcaagcttcgtaagtgcggcaggctttcgcaggaaacggggtcgcaggaaacggggaaagcgatgggcttgccactgacctgccccagcagtatcgcctgccagcgaccctggccagacgagagaaagtgggccctggacggcgagctgcaggtcgcaacttttaaggggtcgcgctgcagaccgctgcgtcacttctctcgcctccgcgcgcgaaacaaggccgaacctcttgcttggcctgagcgacctcaacttctacccaacctcgccatccgtcccgacaacgaccttcactacagcctacgcctttcttgcgacctagaaaggctagcctcggtcatccctagaagcgccgctctggctttctgcccgcgcgccagtcacccagcgagctcacgcggccgccctcctcggcaaccctcgagcgccccaagctcgtgcctccttgccagctgaagaagtccctcacctcctgcagcagcacgacaagtccttcgcttgcacctgcagacaccgcccaccctgaaccgccgcttgctcgcctctctctgagcgaggccgcctaggagcaacgacctcttgccggatgcccgcccgcccctcggcctcgacggccgccgcctccggcagcagcagtagcgccggcgccggcccatccaccgcgtcgtcatcttcgcttgcgctcgctcggctcagcgacggcaaggctctcgttcccaacagtctgttagtcccgggcgcggctgctggaggcggcaagcagggcaagattccggcgttcctccagaagctgtacacgtcagtcgacccccggccatgtccccatctggccgttgctccgctgccacctgttgcagcttgcaccaagcggcacggcgagctttcattcagcgaagaggagcttgggcgggcgcacaatcagttctgaccttcgctacgtccctccgaccctcgcaggatggtcgactcgcccgaaacgaactcgctcatctactggtccgacggcggcgactcattcttcggtgcgtgtcgtcggctgactcttttcagctcctacgcatacgtaggctgaccggctcgccgattcctaaccctcgtgccagtgcccaaccacgaggcctttggcaaggagctcctcccgcgctttttcaagcactcaaacttctcgagcttcgtccgccagctcaacatgtgcgtcctctataaggtcaagaaacgtagcttacacagctgacactcgcgttcccctccgccgtacaggtacggcttccacaaggtgccgcacatgcagcagggcgtgctcgagcccaactcgtcgtcggagctctgggagttcaccaacccaaactttcagcgcgaccagcagcacctccttccgctcgtcacgcggaagaaggctcttcacccgacgattgagcacccggacggcgctggcggctcgggcggcgacgacggcccgtccggctccggctctggcagcggtaagggggtcgacgtgcctgcgatcctcaactcgatcgcaacgatccgggctcagcagacggcgctgtcggccgacctcaaggagctccagcagtcgaatcagcacctctggaccgaggcgcttgccgcgcgcgagcggcataagcagcaccaggacacgaccgaccgcatcctccgcttccttgccggcgtctttggccaaggtgccgcgggcgacattgcctcgggtgtcggcggtgacagcggcaaccaaagcgtcagcagcgctgttagggccgccaaggagtcgatgctcgcaggcggcctcggttcgagtggcagcggcgccggcggaggggcgagcggaagtcggggaggccaggcgacggcagctggctcgggcggggtcgttgcgcgcaatcgcggcctcatgattcaggcgggtcaggtgacaacgccgccgtcgtcagcgggcaacgaaggcctgcagagcacgctcacgcacgaggagccactcgaggagatctcggcaggtgcggaggccatcattcgctgatttttcattgacgagcttcgttgaccttgttccttttgcacctttgcagaccgcttcatggaggttcagacgacgccaacgccgacaccatcgacaacgcaaggcgcgccctcgccatacccgccgacgctgacacgggcgacatcgacggcactcgttccgcgcgtcgcccagccatatccgccacaacagcagcaggaacagcaccagagcgcgcaacagtcccagcagaacggcgacattggtcaatatttcaacttcagcggccagcctcaggcgggcggctcgtcgactgcgctcgacgccttcacgccatccttccttgccgacttcgcctctgctgtgggcccgctttcgccggcgacgctcggcgcgctcagcgcccccaccccgcagtcagactcggccgccggtctctcctcgtcagctcttcagcagcagcagcaggcgagctcacaagcgctcgagcggagctaccagtcggccgacgccatctcaaccgaggtcgacacgctccaggcgagcatcgaggacctcgtcgcttcactcggcctcagcggcgagatgcggcccgacggcacgtgggatccaccaccggccgagcacgtcagcgacgtagcaggacagtacaccggcaacgatttcgatatggagtcgttcctgtcggatttgacgggctcggcaccgacgccggcagcgacaacgggcgcgacgccgccggccgcccccggaccaccggagctaggtgggatagcgccctcgctgagtggcctgtcgccgacctcctcgctcggactcgacgacgaatcgtctgcgctcgagccgaccatcgagacgcccggcacgacggggacggcaacctcggtggcctcgccccagacggacggcgagcagccggccaagcgctcaagcaagcgcaagagcgacgtctcgctcgtcgaaccaaacggaaaaagccagcggctagtctaaagacgtctggccttcagtagacctgtcgtgaagcacacttccatcctccactccactgcatcagtttcgtcttcgccgtcacgcaatcacgtctcgtcgttagcgcacactttcagcctcctacagcacagcatcactccctctctcgcgtaccctctctctaatcgcatgcgcgtactttgtctgaggggcagggtatagttcgactgcgagaaaagtgtggatatatgtggctcgctggacgtacgcttactcggctgagtggtgcgaatgactcggggtggcgagctcctcccgctgctgcctgccatccgttatcatctctcgtaccagtcacaagcctctcagcagcaggcggccgcctcagcatggtcgccccgcactgcctgagcgcctatccgccttcgcccttgcgtccaagcagtgtcccagcgcccattcccatcggctcgccagcaagcggccgtagccgcccgccgctcggcggcggcaacagtcctgacggcgccatcgccatccctcggggctcgtacagccggagcatctgcctgagcacaagcccgagtgttagtctctcgtacagcagcattcatggagcggctaccgagtcgaaagactcagcggtcaaggccggccgtcggcgcagctcgggcgctatgctcggctcgacggcatcgtccctcaccggcagcggagcggcctggctgcgaggacacagctcgtcgttcgcaggcagctacgaggccaggtacgagcgcttccctctccgctcgcaaaaccctacttggagcacgggagtgactttcacccttcctctgtctgcgcggcagcctcctgtcgttccgcttcgccagcccgccctcggcgccgtgcccctttctcctcaagctcacggcctcgtcaacctgcatgctctcaatgtcgtgcaagccgctagcacctccgcttatcctcccgttcgaggcctgcttcttccctctggccgagacggttgttgccgacgccggcaccccgccgccgctcgagtcaacgccgacgacgcccttcgtcgcgagcatcgatctctcggcccacttcgccagcctgcccttcccagctcccctgccaacctttccaggctacccaatacttgcagccggccagattcaggccgtcatctcgaacccgcatggccatggcgtccgcctcttcgtcatcccgtacgacgtgagcggcctgcccgtccgccaccgcgtggtcctccgccagaatgtcttcgaggagcttcaggacggtcagagcggatgtcaacgtcgtctgcgggcgagtgcgactcttcacatctgctgcgtcgagggcaagcggccacggacgtcaatcccgggctcaacagccaaaacgtcgcagagcgtgccgcacgcagggcttgacgccgttgcctcggtcgccagcccgtcaccaaagtactacctccactcgacaatccgattcgtcttttctagtcagccttcggttacgctacccgacgacgggccggccctccaaatgacgacacggacggtcgtcgacatgggcgcgccggccgaaggcccatcgcgcttcattccttggctcgacgacgacgcagccgagtatgctgcaattcgacaggtgggtcgcagttcgctctgattttagttgcgcgatgagctgaccatattatgctcgcgattatccagatgcgcaaggttcagatcaagcgcctcagtcacggcggagtagaagtgcctgccgcaaccggtcccaggcctgcgttcgtctcgccggcatcgctccttggcgccggtctgcataacgggccggtcgaaccttcgagctctctcccactgccgcgccaggcagagacctacgcgttgccccctctcgcgcgcgacgtcaaccacgaccttttgccgtcgccctccctccatcaggcaccactaccgaccccgaaagcgaccatctcgccgacaccaacgccgcttgccttctccaaggtccgtaatcgggccgtgcccagcggtaggtcgagtccggtcctgcctgcggcagaggagagcgagctgagtcgaaagatgcgcggcctgcgcgtcgaccggcctggccgctgagccatcacggacgcttctccaacccacccctttgcttcacactttgctttccttcgcttgctgctctcacacgtataacagccgcaccccacctcacatctcgcgtccctcacctcgcactgtactaccgcccacccactatctgcatgcctcggtccgaagtcagccgcgtcgagagggaggacatgggatgcggaagctgagcgagattacatacggacaaaaagagggacagacaagcaacgaggaatcggcaaggaaagctcgaaattaaagccgagagtagataaagagtaggacgagcagcgagagatgagggagaggatccgagagaagagtgttccaaaatagagggtcctggagaaacgtctagacgaggatcgggacgtcgagctcactcgcgtcgccgaccacatgcttggcgtcgacagcgttgtcgtcaaagctcgaagcggccgatcgcgtcggcacaccgacgccgtcatcccagcgtcgcacgtcgtattcacttgcgccgagctcggccccggccgcctgccagcggctgatggcggcctgacgcttagcaccggcgagctggagaaggtacggctgataggtagcgtggtcgtaggtgaactgcaaatacaaacgcgcggagaacgtcagcagcgctcttgagagaaagcgagactgactgcaaacgacgcacgtcgagctcgcctccccagtcgccgatgagcacagccgaatcgatccggccgccgacctggcccttcatgtcgaccttatccttggttgccgggtcgatgaagggccagacaaccgtcaggaaggcgttgagcatcaagggcgtgttgcggacgtaggcggccgcgacgcgctgcgggtagtgatgcgtcatcatcgagagaacctgagggagagacagccgttagtaagcaagcgcaaccgagctcagctgaaagaggcgtgtgcgcacccttgtcgaaagcgagaccgacggccgtttgctcttgccggcgactgcaacccgtgagggcaaggtacgcgtgagggcaaggcaagggttaatcttcaaaagcgcttactggcagtgttgagacgactcacagttgaggaggacgacggcgccgtcgacgccgggccccatgaggtcacagcagcgctcccagagccagacgaggtgccggaactggcgctcgctcgggtcggtgtcgcgtcgcgagggcgtgatgtagaagagtggctcggcctgggtcgaatagccgagcaggtaggccttgccgcagacgccctggcaggtcagcagcatcaaggggtcagtccgttgtgttcagaggcgggctgacgtcgctgaagtgaccgctgctgacctcagactcgacctcgttggctgcaatctcatcgaccccgatctctcgtcgccagaggagggtggcctgaattcgaggtatagcctgccgagcgtcgcccttgctcgactgaagatagctggagggggagaggttgagcgacgggaatccgcagtcagccaccgaggcgtcgctgcaaaggggcgctggcaaacagcggggagaccgaccgaagaaagcattctttcgactgttcgagacgaaggaaaggcgaggtcagcctgaagctcagtaggagagcggtagatgaaggagctccgcaccagccagtagcgctcgcccggcaggagagccgtcagaggctggcctgccttgccgtgctcaggcagcgcaaaggtccggtccgagaagtgctcgcgaacgagctcgagctgctcgcgctcgtcggccttgaggactggcgccgatccaagcgaggcaatggtagcggccgaggggctgatgacagaggcgggcatccaagcggctcgcgttattggctgagacggagggtcgatggagcgtcgggctcagcgggaagcgtagaagttcgagcgggtccgggcggtcgaaagtcggctgcggagcgttgtgcaggcgtcggactagcgtgagggcggcaagtggtctgagcaaaatggcgctcaagaggggtcgatgttggagtagatgacggagggcgggagcaagggacgacgtcgaagagagcttctggccaaggcaactcgaaccgaaaacagcctgccttgcgagcgtttagagtttgtctgccgggccggccgggcttgctttggtcgcctgcatccggcagattggggccccagcttcgacgactcctcgctcagacgacgacgacaaaggtgcaagtgccatgccatgcgtcggcctagcgtgatacaacaatggagaggatctcctcccgcgagcgcttcagtacgactcagcctgccacttgtcaaattcgggcgcgatgatcgagacggtcggggtgattccgccgacggcgatcagcatctccttctgcagagtggcaaagcacgagaccaaagtcagcagactgctcgaggcttgttggcaggttgcgaagaggggacgcaccggatgtaaggtcagggcgttcttccaaggcgcaaacggccgggcacggctcggggccgaggcattgatcgggatgagacggtgggtgacgagcgtcggttctggcgtgccaatgtagtggatgtcgaggtactgggaccgccggtgcgtgatgttgtcgacgacgggagaagagagactgagtgaggggacagcaggtcagtgccgtttccgaagacgcagagaaggaagcgcgacgcacgatgtgacaaagggcgagtgcgagtgggttgaaatagccgagaggccgcccggttgaacggtcgccgttgagattggatccgaattcagccggaagtcccagacgctgacggtcccgtcgagcgagcccgagacgagcgtgttgccgccttcttgcagccgaacgtcctggacccagctcttgtgggcgtcgtagatccggacgagcgactcttcgggcgcgcaccgcttgtcaaagagctggactgtgccgtcgccgaggccggccgcaaagatggcgccgtccgtctcggtagagagcgacgtgatgggacagctcgccttggtcgggacgtcctgcagaggtcgaggagcgggaaagcgatggcggtcagtgcgggcgccgcagccgagtacgaggcggaaggcgcttaccgcctgcgtcagctcccggttggcgtcccagacacgaatgtagtccatgtcgccggcgacgtaaagattacccgagtgctggtcccaagcggtgacggtcccgctcggcgtcgagctcggcagagtcgtcgaaacagcccggaaggccgaagcgacctccatctcgcccgcgtcgtcgtactttcggaaaagacggacgttgccgtcggctgcggcagggagagagatatgacggtcagcgtcgaccaaaagctgactcggggtctggtcgcagacgcacaggaggcagtgagcagcagcgcctccgagacctcgttaataaagtagaggctcgtgatcggcccagatccggtgccattggcgaagcgactcaaccgccggcgcgagcgccagtcccaaacgctgcagagaatgggggtaagggtgagcaaccggacgacacacgcagtcgcaacaaaggaggggccgcacctgaccgagtcgtactcgtccgagacggcgaggtgatcctcgaacgagtggaaggcgagcttcattggccacgagtcggtgacgagcttgctgaccgatttgttccaggggtgatttgctgaaacgatagagggcacggatcagtcagagcgaatgcatcggactctggagcccacgtactcggcttgttctctttcttggcgcgcacgacgtcggccgagatgcattccgaggccgtccgggcttcgagctcaatgcgctcattgcgctcccgccgccagagctgctcattgtactgctcgcttccgggctcgtccggctcttgtgactgagaaaggggtaagggtcagtgtcgactagcaatgaaaggtaagagggcgagaacgggcttaccttcatctgcgactcggtgtagtactcgcacgaccagtcaaaaaaggagctcttgagcggcaagacgtcgtccttgacacgccgggcgaccaagccaatgccgagctcatttgaccggccgccgccaaagaccccgccgcccgcctctgcgccagcgtgccggcggatgatcagccgctccatgtcctcctcgacaagggcggcaatgacctcggccgccgtgcatgccgggtagtcgtgcgccgggccatcctcggcgtccgagtctgggtctggcgttgcgcggaagtagcccgacgagtgaagcgagctcccgctcggcgtcatcggcgtgttcggcgtcggcggtgccgtgccggtgacggaccgtggatacggcggacggtagtgcgcaatgtcaaagccgttgatcggcggatgcgtctcgacgacctcaatcggctccggaggcgactcgggcgccggtgtcaggtagcccgccgcgttcatcagcctcgcggcaaccgagttctggcggattaggccatgctgtcgcggcttgggcgaggcaggcgccatcgtgcgaccgcttggtgacggcgggatgacatcggaggtcgggaacggaaacgacgagtcagccggtcctggagtcgtcgccgacggcgtcgaggcgtacgacgactgagcccgagccgttcggagcggattagtcgggccagcagggcccttgaacatggctggccggacacgagtgccctcggcctgcatgaaagccgagtcaataagaagggccgagatgtagtcgacgacggtgcatgcgagcgttgccacctcggcgtatgggtcgaccgagaattcgagcagcgcggtaaagaccgtgttgcaggaagagagaatcatcttgtcctcctccatctcgccctcgatctcctcgtcgcgcgggatgagcgcccactcttggagcgcgcgcgagacgatgtcgtccgagccgccgtactcgcggccatcgaccgcccggaggctttcctcccagtaagcccaggcggcggcgacaaaccagccgcgccactcgcggacgatggcgctcagcatgatgacgagctccttgcggaccattgggcttgcgtcgccgtacgtcgcaaggacggccgacgtcgcgacgccaatctcagtccgaagctggtcgcgctcggtccggttgagctggacgcctgagccgccgccgcccttcgagtacgggttggacgagccgctgcagccaaagaaggtgccgagggcgtagaggacggcggcccggacctcgaccgagttgtcgcgcagcatctcgcagagcatgttgggcgcgttcagctggaggccgaggttctttgcgtcatcgttgccgtcccagagctgggcgatgcagagcggcgcccactgccggaggaggtagtcatcgtccttcatccggaagaggcaggcggcacagacgtcggacgtaaggcacgcctgctggcccggccggaagtcgcggcaaaagacggcgaggatgaaggcgcacatggcgcggtgctcgctcgcgttcgggatcaggagcggcgccgcgttggccgtgtagggcgagaggatggtcgaaaagtaggcaaagccgttgtccttgagcaggtcggcctggcacgaccggtcgacggcgaggatgcgtgaccagatgaaaatgaggaccggccgaagctcgaccgccggcgactggagcaggcgctggacgtaagggaagatgccaatctcgagcgcctggtggaccgcccacgggccaaggtcgacaaacttggagagcaggatgagtgcccgcagccggtgtgcctgcgagagtaagacctgaagaacgatcggcagctgctccggtggccgacgctcttcgacggcaagcgccgccggcaggccgtgctccggcatggccatcggccgcgggacgacgccgctgttgtggagccagacctgaagcgccgtcaggtgctcgacgtaaaagttcgagggcttgtacttgtaggcaaacggcggcaagctcgggtcgcgtgccgaggcctcggcccggaggaggtcgggcagctgggcgaggcaggcctcgaccgtcaggtcccacgagtcccagagcgggtggttgtgcgtcggcggtagcgccggctcggaccgcggcgtgcagttgtacgtccgcatgatgcgctcggcaaggaggaagttgcggaagagggcggcgacgagcaggtcctgccggaagagccgcctgaagaggtccttcgggaagatgagccaggcgatcgtgtcggtgaccgaggtaaagatccagttgagctcgccgagcggcgtccggcggtccttgaggtcgcccgggatcttcatgaccatgtcgatcgagacgcgcgcccgcggcggtgcgttcggcccgcgtggcttcagcgggtcctgaagggcgtagtaacgaagggcgatctcgatcggcgacgtcaggcacgacgtgaacagatcggccggcagctcgggcgtcatgggcaggatctcgttggcggcacaggccgccagctggatgcactcgcgcatcggagccgagggcgcgccgtcgggcgtctgcgacgacgacgtgtgcttgcccgtctcggtgtcacgccgctcggcccagcggttgaaattgttgacgatgttgcccgcattcgagcagtcccagacgaagatgcaagggctgacaaggggcaggcggtgagcagttagcgccagcgcgacctggaggcgcagcgagctagccaagggacgcacctgccgagccagtcctggaggtcgtacaagctgacggggatatactgtgtgtaggtccgattaaagacccagatctcaccgctcgccgttggggccggtacctagatccaggagcagcagtgtcagcagatggagccgagagcgacgagacgcgcgctgggcgagctcgtgcgagccgagtggggcatgacgcacgccgtgtccgttgtagtagaagaggacgcgctcatccttggccgtcttgcgcagctgatggcacagcttctttgtgtcctcgaatgccgggtcgaggtactacagggaaagaggtaagcaaggtgagctacgctcggcgaggtgcgcgcgagccggcagctcggctcagagggacgcaccagcttgtagcggaccttctgcgatagcgtctcaaattgtcgctgcaggttcttgccaacctcctcgactagtagagtgacaggcctgtcagcgtaaagctgagcttcagtaggcgagaatggaggccgactgacgagctttctctggccgcatcgtcgacgggtcgacccagcactcgagcttggcgcacggcttcgtcttgatgatgtcgggcgggtcagtcgcaatgttgaggcagatgacgagcgcagccgcatgcgtcttgagccgcgacttgagccgccagtcgagcgggtgcccatcggccgacgacttggggttgccgccggtgagatgccgcttggtcgtccagtgcgggaggacgaacgagagggcggcctcctcctcgacgagttcgtcggcctcaggctggccatcgtagagctggagcgacatgggtgaagggctgcctagcgagccatgcgctgaagggaaaggtcgaccaaggaagagaggggagtggcctagcagaggtaaggagggagagcagacgaggtcaaggtcgacggctgagatcgtgcgcctggcgaagacgactgacggcaggcgctcgcgtacggcgagtctccctcgacttcggcaaccgccgccacgttacttcggaacaaaaggctctcttattggcaaggtcaggtcaagcaggggtatgatatatgagcgggcgataaatagggcgacaagagcgcacgcctaagggaggtcctcgagagttggggtttggggtatgcgtggcgacggccagcgttccgcgggttccgatgccgacctgggctagcagcgaacggatatagcaggaagactgagcgggctctaatggtggtcaatgtcgtcgtccgaagacactgcgagcaaggcgaatggagggcgggcatcagcttcgtccgcagcagttgcgcgcacacgacaagcgcgtactcaccgccgccatgtgacgagtagttattcgtgatctgggtaggccgaaatgagagacctgatcagtaagagacttcagtgtatagcaagaagccgatttgcctcgtagtcttcgatcgcaaaggcgaccatgaagcaaagctcggccagccgcgggtcgtcgctcgcctcgactgtcgccgtcgagtcagccttcatcgtgttggtcccgctcgtgtactggcggggcagaacgacgtttatcaacggaatacatggcggtcgacagcacacgggcaggcacaccttgccgagcgtcaccttggtctttgccttgtctgccttgtagccgagcagctcccacccgcccgcctgctccttccaagcgaacctgaagcaagaggaggtcgtcagtaggcctcatgacgacacaagagggccatcggacgcactggttgccgtcatagcccttgaagctgtgctttgtccggaccatgccagacttgctgacgatcgtccggatctcgtcgccgccgtggtagcgagtgatctcgatcttggtcgacatggtcggccgcttggcagagaagacgaggtcctggggagaggatgtcagagggtgtcagcgctcgcctgtgtcgaggatgaccagcgctgaacctgcacgtacgccgcttgtgtcctggccgcggaaaactcggcacgaccagcccgacgtcttttgcgagtagtccacttagcagcaagagaaagctgggtcagagcaaccagcagacgaagtcgacgcagagactgaccataaaaaagagcgtcctcggtgcgttcgtcaacccacaggcagtactgcatcttcatccctgtcgcttcacggaccgcgcacgagcgcgtgcgcagggtaagtcgcactgataaggagcggtcaggaggtcaagctgaggactcacggctgtggaagcggtagatgcggaggacgaccttgccctcggtcaggccgccgagcggcagggctggctcgcgagtgcccgagctcgccgtctcgaagctgacagccgagctgccggtcgcaaagccgacagtccgcgacgagcccgtcgtgaccgtatcgacagaggagaggagcgagctggacgacggcgccgagaggtgcgtcggatcgacctggtcccagccctcgggcgccgtccagccctcggccgacggaaggggcccgtggtgctgcgaaagcccgcgggatgtgctcgtcttgagggccgagcggagcatgggtgaatgatacgataggggtgagagagaggaagagtccaaacgagctgggtgaggctgcacggctgagcaggaggggagggcgagcagcgagagagagggagaggtcgcggagacgatggtggttagccgccactcgagcactcgctcacttgccacctcggcctttccatgcttcgaaaagaaaaggggacgtcgaagaggctttcgtcgggtcgagctcgaacgcgacaggtcgggcgcgcccacgggtcaaagggaacgtgtcagcgagctcgtcggccgtccctttgaccgcccgaggtcggccgcgtgggacgagcgagagacggaagccgagccacctgcatacaccacgagcaagggcccgccgtcgctttgaggccttcagagccctcatcgcaagcgatgaggaggtaaactgcccggacgaggtcgaggtcggaggcgtgtcgccgcaggagaggcgcgcagccggtcgagctggacgagctgaccaccggcccatcgtttagtctggcctggcctgcaagactatctggcagatgcccaagaagcatccggttaggctagtgctcaattcagctcgctccttcgtcgagttggtggagaggccgggttcatcatctcgtctcggcgtacgagccgccggccgggtcgctcggccgcctcttgcgcgggcggcgcaaggccatgacgaggaccgccttgccgctgcatctcgacgtcgaccttcttcggccctcctccctgctcagccctagctctcaagagtctcatcgcagccgctctcgacctcaaggagactttcacagcaagaaaaggagcagctccgtcgcctttgcacagccgcccccttgccctccgcgttgagcttgccgaccacgcccgcaaagctcgccgctctcgtcccatcagctcgccagccaaagcatcatggagcgatacagccgctggcgtgaccctggtaccggaatccaggtgcatcttctgccccactgccgagctaaagaccaaggctgactgtacgctcggacctgcagccgttcctgacgcccgtccctccgagggctgagggctctgccctgctcaccggccttaccgccttgcgctacggcctagccgctgtccgcgtatgtgctgctgactgagctattgggctcctcaagggctgaccaaagccttgctttccttgaacttcagctcgtgcccatccttgtcgtcgtcggcctttacgtcctgacggtcgagctcgtcggcagtgccctcgtccgtctcgctttctatcgcacgtcccggcctgccgctgttactgactctcgtcctcgccacagaacgtcgccggcctatcagcagtcggccggccaatccagcacgtcttcacgaagatctggacgcgactcatcctgctcttcctcggcgcgctccgcttcgacgtcaagcgctcggcgagcaccgcgcgcggcaagtccgagttccaaaagacgtggaagccaaaggcgggcgatgtgatcgtcagcaactgggcgtcgtggatcgagcttctctggttcgcctacaagtcagtcgtccttctgctctggcagcactcggcgctcaggctaaccgcctccgcgtcccgcaggttcgaccccgtgttcgtcatccctgcctcggccaaaacggtttcgccctcgcagccgtcgcccgtctttgcgatgtcgctcggcgccatcctcggctttgtcggccacacgccgatcgacctctcgactgccaacgccgagcccttctcagccgtccggcgccacgcaaaggccgctggccggccggtcgtcctccttcccgagggctcgacgaccaacggccgaggcgtcatgcgcttcatcgacgtcttcggccaagcagccgtcgatatggccggcgacccctggtcggtctggatctgctgcgtccggtacctgagccccacgccgtccagcccgagcgccacgcactctgtcccgtccaagccgctaccaatcgtagcgcatgcactcgccatcctctcggccttcccgccattcgtcggtggcctgccggcgtcgtaccatctgctctcgccgctcgacgcgccgaacgcgcagatgagcggcctgaccgccgcctgcgagaaggccgtcacaacgctcggccggctcaagcgggttcgtcctggctctccatgctagctagcaggcctggtcactgacagccgtctttctatctctgcaggtcggctacgactttgacgacaaaaaggccttcttcgacgtctattacggcaaagcgggcaagaaggcggccaagtagagatggcagggccgagatagatgcgctctttgatgccgcctagatctattgtcaaggagctggtcactcgaaggaatgaggggggcatgtatgcgcggcggcctcaagctgacttgttcgctgattgagccgctgaccaggccttgagccgcgtacgcatggttctcatcgtcgctggcatctaatgtgagcgagagacctatcgtcagcgatcgcaggcccaggcgagaagatacgccgggcgactgacctcgagctcgtcctgaccagctccttccaggtcggcatcggacacgtcggatcgctcagccggtcctgggcccgcagtagctcccacatcagatcggtcaatgcgatccgccggtagaggtgctgcgggattgaggcgagcgtctggacgggccgtgtgtactcgtacgacttggtcagcgttgaccgtcagacggcgagcgagccggaaaagtcggcgagggcctggcaggcgactttggcgcgtcgtagaggatggagagggctagcagggccggcgctccgaccactttgtagagctaccgggcctgggggggaagaagtcgacgaggagcgaccgcgatctgtacttgtcgcaaatcgtgagcaggctgcgaggagagggcgagggcagcatgttagcgccggcctacttaagatgttgacgagaccgacgcacccctcgagctgcatcgtgctcgtcacgagtgggttcgcgatgagggggtggcacaagataaggtatttctccatcagaaagaagtggtcgtcgaggtcgatcacaggcaggccgtccgagctgcgcttcttggtgagggccgagctgtcggcgagcatcgtcgcaaacaccttggacgaggcggcaaggtgctcgcgcagacaacggaaggcgaaagcggaagtttggaggacaagatcgttacgcgagtcaaagaagatcgggtaatccgggctatatcgacgtccgagaggtcggacgagctcgtccccgtcgacgagcgccgggtcggagtggcgaccgtgctgagtgaagaggacatcgaggcgtaactggatgtggaggcgttatcgaaggcttgcatgggactgacagaaggcgagttcaggccgacaggagaaggaaaaggaggaggagatggtcggaggtaagagttgagaagcgcctgcgcgaaggcaactgtggcccgtgccgagcgccggccgtgcagcagtcgcgagagctgtgagtgagagccgactgggcgggctgtgaagaataaggcgcgtttgactgatcgaggactgcaggacaatcagggtggtcgttgggagcgaaggatgagacggctttcgagccgatgaaagggggggcggcgcgcagcggtcaaaaccctctgtactgagcgctccgccgaggctacgagccggaagtctttatcatcagggttttgataggtagcggtcttggagttggggtgtctcgatgcagagggcgtgtgagcgtgtcggaaagaaagggagatggagcgagatgtgcaaggaggcggtcgttagagggcgcgggccggggaaggaagtgcgaggaaggaggcggtcgatgtacgaggacggaaagcggagagggtcgtttgggttgcatggcatgggaaggatggaaggtggcgtgaagggtgggttgtgaagcggcctggataaagacggggccgctagtggttggtttgtgagaagtgaagggtgatgttcaagcgctctctggcccagtttcctctagatgtcgaccggctgaggcgacggggcgtcgacacgagcccgcttggcgcgagtgggcgacatctcgccctgctcgttgtcgacgaccgtgacgtcggtcgggccgccctcgtctttgcgcttggcgccgccattgaggcctttgccggcggcggcggccgtcatctcgcgcatctcgtccgcctccatgtcgcccgctgcagcagcctcgtgagtcggctcggtcgccgccgtcgtagcggccgccactgctgctacagcaggaggcaaaccgacgtcgttccgtcccgagcggcgcgcgcagatcggacacgcgcacgacgtcagcggctgccaggcgcgccaccagatgcgcgcgaggtggtcgaccgtctcgcgcccgagctcggtcaggtcgaccgggatcgccgggacggccgctgtctttggccgggggtcgtggctctggaagcgcgttgggagggcgaccggcaacggcgccggggtgggtacggcaacgggcttggcgaggagctcgtcgtgaggcgggggcgaggttgacgttggtggggtcgagaaggccgggctgaggccagaccagtgcgagtgggcgtgcgactcgggcgaggccgtcgaaggttcggcaccggccgtcgcgctgccgacgctcgtccgcgccgagcgaggcgcggcggctgagggctggacaggcccgatcaagggcgagtcggccaccgatgtggtcgaggacgtgatgggccggccgaccggggactggacagccggcgacggcagtggtgacggcggcctcgtggcgtcgataaactgacggacgacgacccccgccggcacgcccttccgctcgcccgtcgcgagcgccccgctgagccaatgtgccgcgcccgactcccatgcaaacccgagctggacaaacccgagcacatgctcgagatggagacccgccgcggccgggacgggctcgtggagcgtcgcgagggctgagacaagcgtgttgagcgctggccgaagggtcgcttcgagctggaggacgtaggcctcgctgagtgagttggggaggtcggccgtgagcgcgagcgagggtgggcgggtcttgtaaacttttgggtgcgggacgtgggccggcgcaggcggcgcagagaggtcgccgccgatgagcggctggcggacccagagcggccggtagcaagcaaggtcaaagtcggccgaccggggcgctttcctgccggcgaagcgcttgaggacggcctcggtgccctgccaataggtcgaccaatgctcgttcggcgagacccagtagccggcgaggatccgatcccgcgtccaggttgtgatagccatccgggcgagctgcagaagctcttcgtcgtcgagccggggccggccgttcgagtcgagatcgtcgtcctcgtcggcgtcgagctcgtcgtcctcaccctcgtccgtcagctcctcaaaagcatggagcgcgtcgagcggattctcgcccttgtcggctgggcggagcaggtcgccgagctcctcggccgcgagctcagcatcgccccggaggacacgggcgatcgcccgccggtcagcccggtcgcgcttcgtcttgaccggccgctcgttgagccgctggtcgatcgcgccgtcacagtagacggtgaacggcgtccagtcggcgagccagcggccctcgatcaccttcgtgacggcatcgaggacgtggagcgtcccgtcggtgatgtaccggcctccagcgaggaggccgccgtccggccgggcgccgcctgcagagacgagcggcggctggtcctggacgcggaggcactcgttaagaatctcttgccggcacgactggcacgagctcgaggccccatctttctccgcgtagagctcgggctcagcgacgggcgcgacgacgatccactctgtcggcgcatcgtcgtcgccaaggcagcgcccgcagcagccgccgaggctcccgtggaccttgcacgtgtaaatcgggccgtggatagtcgacgtccggctgccagcccggctcatgacgaagtcgttggcgatgcaggcccagcagaactgccagacgttgcggaaggccgttgagtcgaatcggatcgggctccggagcgcgaggttctggggcccgcagatgagctcgaggagctcagaccagatgctgagcccattggctgcggcgagacagcaacgaaagacgcaagagggtcagcttcgcattatactgacgtagagtcaaggagacggtcgacgcactggctgcgcgccacgctttgctgaccagccgccaacggacgacgtctgtccgggccttggcgacgacgagcagctggcccgtctcgttgttgtgggtcgtcctccggtcccggacggtccccggcaggcggaggtcgtagtagtcgtacaggtcctcgtaggccatttcgaggatcgagctgacaaaagcgcctcgcacccgtcagtgagagaggtcgaaaaggaggcgcttcgcaagaggacgacatacgcacgagaggatctcggccgggagctcggccggcttccagaacttgcctttcttggtcgcgaccggccggcgaccgttgaccttctggcgctcggccgcgagcgcacgcgctcgctcgagctcgtgcttctgctgaaggaggtcggcagcaaacgggccagctgtagacgaggaggaggacgagccgccaacggtgggtgtgctaggagcaaaaccggagctggccttcgtcctcggagcgacgacgcgtagcttgaggttggcctgccggtgctgcttctcgggcgccgacggtagacgctcggccaagagggtgctggccgggaagagcgtcggatcgatggccatgtcctcgtccccaaccgcatcgtcctcctcgtcattctcccatccatcgagctcctcctcaccctcgccctcgccgccgtcgggcccgagcccgtccgggtctgagtaatgcgacgcgaggtcggccgcccagcccctccgttcagcctcgcccgccgcgtcgatgaccgactcgtacgacccgagctcggacgagtggaccgagtggaggccgtcgtcggacggcgtgtgggggtaagaggggtcgacggcggcggcgcgactcgtgcgttcgagcagccgggcgtcggacggcgggagcgagtcggtcgcgcgcgcgctgcgggcaggagcgggcgagcgaatgatctcgaggacgccggcgtttggcgagaggtcatcgtcgtcgtcgtcgtcctcgtcgggtgtgacgggaggtgagccggacgggttggcgtcgacagtcgttaggccgccggccgcagcggtcgaccggtcgacgcgttcgcgcacaatctcatcgaccgagatgccgaggaactctgcctcgcgccggatggcgtcgagcgtcgggtccattggctcggacgctggcgagtccgggtcgtcgagctcgggagagggccgggaggtggccatcggtctcgggctctcctgagcgaggagggaaggtggagggcggcgggccagggcagacgagtgagagcgcgccggagccggccgggcggaagaggtgtggattgggagatggaggtcgcctgcttgggtcgacaaggaccggctggatctgcggactctggctagcccctttgaggcgatgttcgctgcgactcgactcgctttccggcgcgtcgtcgaccatcgcgacgaggtcacggcgcgcgcgtcggtgcgggagccgctgcggggattcatctattgacgcaagattcaaataagccgtcacttagacggctgccccccagccgtgcgcgcgcgcgtgcgggcgacggccgcttcgccctgctcgcaacctccgccccttgcctgcacctccgtcccctcacccctccgccctaccctctccttcttcttctgttctctcactccaggcatgcaccgcgccgccttctccgtcgcccgtcgggtgcccaccctcgctcgtggtgcgtctccacctcctctcgcggtcgacccggcagaccgccgggacttggccgcgtcgttgctcttctgcttctgcgcgcgctcgcgtccgaagctgacctgacctctcctctcgcccgcttgcaggcctcgctacctcggcccggcgcgatgccttctcaaagtacacgtttccggccatgtcgccgacgatgaccgagggcggcatcgccgcttggaagaagcaggtcggcgactcgttcaccgccggcgacgtcgttttcgagatcgtgcgtttcctcccctcggcttgcggctttgctccgcctgccttggccctctgctccatcgacgcatgctgatcgtcgcctcttctctctcgcttccgtcttgcaggagaccgacaaggctacgatggacgtcgagtcgtgagtctctgccttggcccatcggagctcggccggctccccccggctccccagattttgatcgaccaagccgggagcgggccggtgccgccttcgtcgcacggcgccggttggctcgtacgaatgcactcatggctgatatctgggctgcttggcgtcttgcgcgtgggacaggcaggaggacggcatcgtcggcaagatcatcgtgcgtccatcctttgtctcaggcggcccgagcgctcgaaccgcagctgaccttctattgcctcccgcctttcacgcttgcagatcgacgagggcgccaagggcctccaggtcggcgagctgattgccgtcatggccgaggagggcgacgacctctccacgatcgacgcctggctcgccgagaacggcgggggcgagtcggccgccaagtcggccgagcccgagacggccaaggaggagtctgcgccgaaggagcaggagcagaagggcgcgtccgagggcggaaagacgacgacctcgatggagattccgccgtccaagcctgccgtcggcggaaaggagtcggcccaggaggcgcccaagctcgcgtccgaggcctcgaagctgaaccggatcgcggcgacgccggtcgcgcgccggatcgcccaggagaagggcgtcccgctcgaccaggtcaagggctcgggcccgaacggccggatcgtcaaggaggacgtcgagaagttccaggctaaggcgcccaaggcagctgctcccgccgcctcgtcgtcgtcgtcggctgctgcccctgctgcgtacgaggacgtcccggcttcgaacatgcgcaagacgatctcgaagcggctgctcgagtcgtcccagtcgatccccaactactttgttaccgtcgagatcaacatgggtccgtcctcgcgcgcgcccgcttctcttccccgcgcgacgtcttaactgacccgcccgcgctcccgctctgcagacaagctgatgaagctccgcgagctcttcaacggcgccggcaaggctggagccgtcaagctctcggtcaacgacttcatcgtcaaggccgtctcgctcgcgctcacggacgtcccggaggccaactcggcctggatgggcgacttcatccggcagtgcgtcttagcctctagaattctcttcgccttgcctctgctgacaccctcttgtcttgctggctctcgcaggtacaagaaggccgacatctgcgtcgccgtcgccaccccgaccggcctcatcacgcccatcatcaaggacgctggcggcaagggcctcgccgccatctcgtccgagaccaaggcgctcgccgccaaggcgcgggacggcaagctcaagcctgaggagtaccagggcgggtccttcaccgtctcgaacctcggcatgtttggcgtctcgcacttcaccgccatcatcaacccgccccagtcgtgcatcctcgcggtcggagcgacggcccccaaagtcgtcgcttcgacgacggctgagggaggtttcgagtcggtcaacgtcatgaacgtcacgctgacggccgaccaccggaccgtcgacggcgccgtcggcgcccagttcctcaaggccttcaagggctacatggagaacccgctgacgttcatgctctaaagcaggacgtttgcgattcttctttcttccccttgtactggccgccgggcgggcgggcgtagacgacgacgatggaaggcgcggagaggaggggcgcgctagaggaggcgacacgttttcttttgcatcttgatgacggttccgttttcgggcagggcgggatggcgagggctgactgacgagggcggcgctgacccgagcaagctgacggtcacagggcgcgaggacaaagggcagcagaggtcatgatctaggagcagggcaggcgaggacagggcgagtgagaacaaggcgaaacagaacgaggcgagcgagagaacaaggcaagcgagaacagagcgaggcgggagcgtccttggtgactgatcgaggcgaggcgaaagatgaagggggaaagatgaaagggagagcagatgaagaagaaaagggagagagtcgcgtctcattggttggcgaggccgagccgcttctcctcgagccggatctcctcttgctcggcagccatgcgctccttgcgcgcccggaggactgccagccggtcagcctcggacccgctcggcgccggcggcagcggcggaaggacgtggtgagccggcatcgaggcgtagtgcgagggcatggccgcctgttcggcgtgcggctcctgcttgacgtactgcgcgtggtgcgggtgctgggcgtggtgcatcgggtggtagccgtacgcgtgcggcggggcgtagtactgctggtggagcggaggaggaaggagctgctgcgagagcgcgcgacggcgctttgtcggccgcttggcctggcgctcagccgagggctgctcgccggcccaggagtactggcgcgggtgggacggccggctggaggccgggtagggctcggccggcgagccgtaggaagcgtactcggcagggtaggggtgcgggtacgagtacgggtaggggtgcgggtaggcgtctgggcgcgtctcgtgcgggtggccgccgtaagggtaggcgtgtgagggcggcgaaggcgaaggcgccatcggagccggcgtgccgtactgcggccggtagggcgctgggagatggatcggccgtctgggcgcatgctcgctcgaatggtgcgaccaagccgagagcggcggctggccgtactgagccggctgctcggagacgtcggcggccagcggcgagggcaagtggaagtcgtcgatcggctcagcggcatcttcgctcacgtcgggcgtaccggggacggtcgagtcaaacgatgagccagatgagttgcggacggtcgtgtcgcggatcgacgacgtgcgctggagagcggtcgaagggacaccgtggccgacgatggcctggctgccgacgagcatcgcaccctcggaaagtcggcgagtgcgcgaccgagtggctgagccgagcgagggcggtggcaggaggggcgacgacggcagggtgaccgagacggtgaggggtgctggctgcttgggcgcagagcggagccgaggcagcgagcggatcgtccggaggtccttctccgacgacagggcatcctccttgaccgcgtcagaggccttcttggcggccgcgcgcacaggccgccgaggggcaggcgtcgaggccggagccggggctgagcgggccgacaccttgcgcttcggcgccggaggcaacaaatcgctgtcgtcgccggaccggtcgtcgtcgttgttgtcgtcctcgtcctcgggctcgctgtcgtcgccgagctgatcgcggccgtcgcggaccgaagccgtcgtctcgtcgatgacgttgagcatccagtcgcgcacgcgatccgaagtgcgctcgtcgacgtaggcctcgactcgctcgatggcattgaggaggtcgcgcgagagcgtcgaggcctggccgagcttaaagtcaaggacgagctcgcgcatgcggtcatgattgctctccgcgatctcgcgcgcgacctgggtccagccctgcgagcggcggaggatgggaagtcagctcacgctctgttaaggggggcgatcgccggctgggttgagaggcgaagcagagggacgcaccgagcgccggcgcatgttgatcatcctggagcgacaagacgaagggagggtggcgcgtcagctcggcggccgaaataaaaggggggccgcttgaacaaagggaagccgccggcgcgagcaaaaaaaaagcagctcggacaacgcaccagccgttgacctggccgaccgacatgtcgacagtcgagcagagcgtcgccttctcctcggccgtcgggaacgggtgctcgaggtgggcgaggaaccagttgcggaggaggcggacggatgaggtgggggcggcagggctggcgtcatccaccaagccgtgaaggtccgaagcattcgcttgggcgttcgaccggcttctgggttgttgatgagctttgacgcggcggatgatatctgaggcaatgagcgagttagtgtcgaaaggctgcaagcgtatggacttgtaggggccgagcctaccttcgtccagctgcatcttgatccgacgaccctgctgtgttatgtcaagaaagacgctcgacatgccttggagggctgtcgccaccgatgcgcctagatccgaagttctttggtctagccgtccgagctccttctcgagcaagacctccttgaagaggcccgcaaggttgtcgatgtagtcttcgaggccgcggttggccgtcactgcttcgaggaaactatggagcgtgcgctctagacgaatcgccaaggtggggctggcctcctggacagacattcggatgagaacactcgaagctgaggttcgaggtgttgtggttagtggaaagatggaggtgccggcggccggcgggctgcagcgcgagccagcggtcgaggaggcgctcagcggggtcccgcacgttttagcccctttgattttcaatctccgcctccttttgttcgcggcgccaccaaagcacgagccgacttcaaggcatcgctcgcgccccttcacctcaccgcaaccctcgctttacccgtcccatcccaaaacttcgatcttctctcctcaggcgatggaaacctcagagctgttggagcaggtacttgcgctggtgaagcagctcgacagagcaggctctgctggaccagtcacgatcccctctccaagctcggccctccaccttcctcctctcgaccttcctctcgtcccgagcttcatcggcaagctcgagaagctcgggctgcagcccgaagtctcgaggagactgcaggacgtcttcgccaagcatgtcgagagctccaaaagctcggtgctcgaggcctatcggaggcagggtccggccctgctcgcgtccctttcagccctggacgaatgtagctcttctcataatcgaccgtcggccgcgatactcgcggatctggctcgtggctgcacccagcgtttcctcgcggtagtctcccggctccaggaccagctcgagcgaagagtcaaggcctggacgtccctctcagcaacgtcgaaggccaccgccggcttcaccaaggtgagctcgcgcctctcgagctcgcctcctcctttccagctcgctaacgtcctccttccctctcgcaggccgccatcgaaaccctccgtcgcatctacgtcatcaactcgtacccgaacccggccgaggtccgggcgatcgccgagcgcatctcgatggattacaagcaggtccgcgtctgggtgcgtgctcgagccccctttgtcgaccgcttgaccctctcgcgcgccaccccggctgacagccacctctacgccctgcagttccagaaccggcgcaatcgcaagacgctctcggcccgcggcattcaggaggagctccggctcgcccaggagaacggtgtcgtcccgtcgaaggagctcgccgagcaggcccggctgatggccgtcgccgacctgccgctgccgccggccaaggaggcgacgacgacacgcaaggtctcgactggcaaggagacctgggccgcgaccaagaagccggccaaaccggctgtcgtcgtgcgtcgacttcacgagaactacgattggtcgtcgtcgtcgtccgagggtggcatggacgtcgaccgcgatgagggccagtgttcgtcccggccaaccgccctcgacggcctgaccttcagctacgacagcgcttccttactcggctacggtcggccgccggtcgtccactccagctgctacaccagctcggcgggcgtctcgcccgaggcccagtcgtcgtcttcttcgctctcgtactcccacgcgtcgtcgtcctcgctccaggccccaagcggctcctggcagcccacgacgtcatcgacccgagcaacctcgcccgacgaccagtggaatctcgtgccgatccagcacgactactacgcttaccagacgcagctcgacggctcgctcgtcccgccgcagccgcagcgggcggactcctacagctcggcggcctcgtcctcccccagcatgtcggacctcgactcgctctggtcgatcgcaagcctcgacccgtcgacaacctactcgacctttgcctcagcgccttgcgtcccgaccaacctcgacttcgtgccgcctccgccgtcggacgaacttacgctcgcctgctcggacccggccttcgacccgcccgaatacctcctcgcctcgacaattccagccttctcgtcctcaccgacgccactaacgccatgcgagcgcgtgcttgacttttcctcggctgagggcttccaggcgttcctcgactcgtcctcgggcaacggcgccgacgacgacgcaaccggcggcctgctttggggcagcggcagcgacgtcctcgagctcacaaacgagatcgaccaggtcatccgcgagttcacgcccgagggcggcactgacggcggcggctccttctcgctcttcgacttcaacatcccgccgcccgctaccgaggcgtggtgaccgaccatcttcgctctctcccttccttcgtcttttgcttctgcctccatacctcggtcttgcccttatctccccattgctcatctctgccatacccgctgtctgtttcatctacccctcatctcgttcctgcttccaccttcgctttgcacatacccgcttcgcgctcgctcgtcttccgcggcccactcgccattcgtcccttagaccttttctcttctttcgctcggcttactttctcaacgactgctcgcgtagactagccacagtgcgagcgagaagcgaatgggaggtcatgcagagggagggcgaaaaatgcaggagaagttcagacgtgagtggggtacaacagtcggcaggcagcaaggtaagggagggatatgatggggagggggcaacgcctcagatctccaccatgtcgacgtgctttttcttcttggagacgcccttggcctttgacttgcgcttcttcggggcgggcgcctcgactttaaagggaggggcgggtcggggtcagcaaagcgcgggcaatgtcgcacgcggccgggcggagagacgcaccaggaggaggcgcatcgtcgtcgtcgtcgtcttgggtggcggccggcttgctggcgccgaagaagtcgtcctcgtcggcgtctttcgaggcaccgccaaaggccgagatgctggcggcagcaggacgagttgcggccgctgatttcgtcttgcccttgcccttcgtcttggccgtaggtgccggggcgttgagggcctccttctcggcacgctcacggcgggcgatcgactcggcgagctcgtcgtcgtccatgagcagcgagaggacctcgttcgtcttgacgacctcgccgacaggcttctggccgacgacaatgtcttggacctgcagggtgggagaggcttgacgatcagcttggtttcgagcggaaaacagagtgaaagaggccggccactcacgtcctttttttggcgcgcgagcttgacgatgcgctcgtcgatcgtgcccttggtgatgagccggtagacggtgacctgcttggtctggccgagccggtggacgcggtccatcgcctgggcgtcgttcgacgggttccagtcgttgtcgtctgcaagaaggagcagtgtcagcgtcttgcggtatggacaggaatcgttgaggagacgcacaaaagatgacggtatcggcggcagtgagattgatgccgagtcctccagcgcgggtcgaaagcaggaagacgaagaggtcggggctgcgtaaagaaggcgggttgacggtcagcgcgggtcacgctggcatgagcccactgagcaacgaaagcaatcacgcactcgctctgccacgaagtgaccatgtcgcgccggtcctcgatcttggacgagccgtcgagccgcaggtagcggtacgagcggtaggcgaggtactcttcgagcagatcgatcatgcgggtcatctggaaaaagatgaggacgcggtggccgccggccttgagctcgcgcaggagcgcatcgagccgggcgagtttggcggagtcaaagatgagccggttaatgtcgggcatcgacatgttggcccgcggcaactgctgtgggccagagcgcccgacgaggccgtcaagcggcagaccgggcagtaccgtctcgagcgcggcgaccgccttggggtcctcgcggtcccgcggcgagaggccaaaaagtgccttgctcgacagctggtcgtgcattgtccgctgctggcgctccatgtacgagaccgaggtcgagtaggacgagatgggcggagcgacagcgcgagggagcgcgaagcgggccgagtggtgcgagaggtacgaccgaccccaggcctgctcgactgcctcgtccagcggcacgagcgtcgggtcgccgttaccagcagggagaagggccgcctttggaacgacgcgcacctgaaggcgcgaggatgaggtcttcgaagcagcaaagttgggctcgaactcaaagggcgcattgcgcagctggtcggcgttgcgcgccgcggcagagacgaggttctggatcggcgaccgcttaacgtgcgcgtgcgcctggccggccgacatgccgagcagtggcagcgccgaaaaggccgagcctggaggcaggggcaggctttggtcagtcagacaacccgacggggcgaatcaacttcgagacaaagaacgcaccggcctgcttgagcgagcgagtgatatggtcgacgctccagatactcatgagcgtctgcaagttgtacgtgtcggagccggctcgcgagaactcgccagggacggtgagcaggccgccgtcctcctcgaagagtcgcgggacggagacttcgattgggtttcgggccgagtctgggcaggtgaggaggtcgccctcgcgcaagatgctggcggtgcgagcaaagctgccgaacgagagcggcgctttgacgtcggcccggtcaaagagctgcgggtggttgcagacctgatacggggaccaggcgggaggcgtcagttgaggttgggctgcagacctgcatcggggggccgacgcaccttgcggagctgcatgacgatgttcatgagcgactggacgccctcctggtcgtcgttggtcgcgcggtccatgagctcagccatcgaaatgttggcgcgcaggctcttgtacatcgtccgctggatgggcgacgggtcgacatagacgtcgagctcgatctgcgaaggagggcgaggcgtcagtctgctggctcgagcgatcgactctctgccggacgcaccttgtcgccaagctcgttctggacgtgcttcttgatgcgccggagcatgaacggcttgagaatcatgtgcagccgccgaagctggtgctcgttgtacttgctgccgccctgcttgtcagccgcgttctcgatgtcgcgcgagaaccactcgctgaactcatcgtgtgagtcgaagagactcggcatgataaagtggagcagggcccagagctctgtaggacgaggtagagtgggtcgagtcagcatcgacagcgggggaatggcctcgagcagaagggcacgcaccctgcatcgaattttggatcggcgtgccggtcaacaggagccgattgcggcagtggaagccgaggagcgtcttccagcgcgtcgacgacgagctcttgatcgcctgagcttcgtcgaggatcatgtactgccacttaaccttctggaagtatttctcgtcggtgacgacctgcggcgggggggtgacgagtcagctcaagtcgacgcctgcatccacgatagccgccacgcaccagctggtagctcgtgacgaggacgtggaatggcgcgtctttattgtagctgatctgcttgcggttccaaaacttgcggagcgtcgcccggtccttgacgttgccccagtaggggagtgccttgagctgcgggacgaagcgcgagatctcctgctgccagttgtggagcgtcgaagccggcgcgacgacgaggaacgggccccagatgtcgtgcacctcggcgaggtaacccatcagcgcaatcgattggatcgtctgcgagggagcggcggagcgagcacgtcagtcaggcgaaagtggatgacccgatcagtcgtcaggctgcccaccttgccgagacccatctcgtcggcgaggatgccgttgatgccctgctcgtataggttggcgagccaggtgagacccttgagctggtagtccttgagcgtcgccgtcagcatcttgggctgctcgaccgtcttctcgtccatcatcgtggggttctggaagttgagctcgtccgggtccactgcgcgatgagagcgaggggtcagcaaaggtgtcacaactgaagggtgagcggcaggacgtactgtccatgccaccggcggcagcctcgttcttgcgccgctcctcggccgcggccttgtcaaacgcggccgccttggcccggtcagccatcatggcgtcctgggcattcttgcgcgcgtgagccgttaggttgttttcgtcgtctacagcaagcgggcgagtggtcagcatgaacatcttgctcgtcagaccttgacaaaatcaagacgcaccctcgttgaagtcaagttcttggagctcgccgttcggcgggccatcgatgagcgctgcggccggaacgttgggcagtgagggtaaaccgcttgacgccgtgtcggccgactgctcggcctcggcggctgaaagaaaaaagccagatagtgtcaatgccaagagcgaggaagaccggcaccgtgcaagacgcactcttgatcttgctgcctacgaaatgcgagtaaagctcggtctgggtgatgaggaaattgagcttgcgcgcctggcgcttggactcgcgctcttcttcctccttcttggcccgctcgagcgcctccttctcggcccgcttgcggttctcgcgctcgtccttctcgttgcgcttccagaacatgagcatctgtgagaggcgaaggtgggcgtcagcgacggcgcacgagtaaagcagcgtaacgggcgacgcacctcgcggttcatcttcttggccttgagctggaggttctttggcgccttctggacgcggacgattgaacgcttgccctcgcggaccatgacgagcgcaagcttcttctgctcgcgccgcttggcgttgactgagctgacgacgacttggtaggcctgcgagaggtgagggaggacgaaggtcagccagcagcactgaagaacaggaaaggcgaatcaggacggacccttgggatgtccttcttagcgatgacgctccaaaccttgcgccgggcctcttcaatccgccacgcaaactcggcctcggtctccatcggcgggccggtcggctgcggactgcctcccctcgacgagacagcgtcgtagtcgtagccgcccacgggaccggcgccgttgttctggaagtagttgggcagcgccgagaaggggtcgtcgaactggccctgctgcgggtagtcgtccgaggccgggtgctgtgacggcgcatactcgtactgctgctgctgctgctgcggggtcggcggccggtatggtggcaggtttggcagttgcgggtacggctgctgctgaaaccgctggtacggctggtacggctgaggctgaggcgagacatccgactgccggctcttcgacttcttcttcggcggagcgggcgtgccgtcttcgttgagcttcggcggccgcttccagttaccctgggagagagaaggtgcagcgtcaacttccagtaagagcgagcgcaagtgggcggcaggggacgcacccggccgacaccggtcgctcgcgacttgcggcccgaagcctcgacgccgcggacaggcgcctgctggtcgaccgccatatggctgccctcgtcgtcagtcgtcgcgagctcgtcaatctcctcgtcctcggcattggcgctccggctccggcggtcgccggcgctaccgtgctcgagcttgcgacgcttgcccaaccggtgctcgtcgaggccaaagttctcaaagtcggaaaagtccgagtcgtcaccgttgccgtcgcccggcggcagtagctcgccgttggccgcgtagggtaggttgacgagcccggcaactgagtggcgcgacttggacgacttcttattgctgggtcggtcggcgcccgacggctcggcgagcgcgacaatgtccgagtcggcaagctcgtcgtcaagctcgccgccctggttcaagctgagccggaccttgagcttctcacgcgcgatgcgccgctcctcgtcgtcctgagcgcgccgcagacggtcctcctcctcctttttctcgcgcgccttctccttcgccttggccttgtaccgcgcccgcgcctcggccgccttggccttcttatcagcgagtgcccggtccttctcggccttgacgcgtgcggcctcgtcggcgatcgccttcaaccgagcggcttcgcgcaggcggtgcgcctcagcttcggcaacgcgatgttcgatctgggcgattttttcggcgtgcgcgttgacggtgcggtcgatatgttgttggtggcggtcctggaatgcagagagtgttataaggtcagccgctgcgacggcgagttatggacgcacagagctcaccttctcgtcagcgtcgaaccactctttgatccggccctggcgctcgacgcgtcgcgcagtccaagaggcaaccgccgacccaacgagcgccacattctcatcgttctcgaggtccgagtcgtacatcgatggctggctctcggcgattgccttggccgcagcggccgccgacgcccgaggctttttgcgcggcgcaggcgcggtcgacgaggctggcgagggcgcaacgtagacctgcgcgttgcttgacgcgccgcgagagcggctgctggacgcggcagtggcgggaggagcggccgatgctgacgggccgttcgtggcgcgcgatttgcggggcgcgggtgctgcgtgagcgccgtggttctgggagccggtgctctgaagggggagcgaaggatcagcctcaaaagggcaaggagcaaagggagaggaccgcaccttgcgcttgctccgcggcttgctccgactgctctcggccgccgttgtatgtgcgtcgagcaggcttgcgccgccctcggccggcggcgcgtagcggacgcccgtcgccgggtcgaaccagacgccgtcctcgcccacctgacctccaggcgggtagctataggcttgctgaggtacgaccggaggcggcaagctgcggtaaaggatgccgccggcgggcgaggtgtagacggcagcagcgccgcctgggccgagcgacgactccgccggcatcgatgcgtacgccggcactcctggcggagcaggcggcggcggagggaggagcgccgggtcgactggcgtcgcgtcgaacagcagcggctggggcgggcctttgggcggcggtgctggctcggccggctggctctggggcgagaggagatggtggagggacgacgagccggccgtgcgcgtcgacgttggctgaagctgctgatgctcctggacctgcgcgagcgagatcgagacgagcacaagccgggtcagtcaaaagtccgaacagaagcagacggcagtcgacaggaacggcggtggacggaagccaggagcacaggccctgtcgcttggcccggccctcctctctcttctcttcctccgctcgcccggtgttgccctgcccagctcgccgacgcgcgctgtgctgctgcagcagctgaaagtagcacgtcgagctctcacggataagccagaggacgagaacgcactggcgtggcgacgccgttggtggccgggtcgtgcgggaggccggttgccatggctgctgctgctgctactgctcctgctggcggcatcacggcgccgccgtcgagcgtcgctggtgctgccgagccggaagcggtcgggtcggccatcgtccgctggcttccttgcgctggtgctgagaaagagatggattcgagggtcgtcgagggtgttggtcggtcctttttctcttcgagacccgggctggcctttgcctctccggccgtcgcctcgccccgcccgcccggtcgctctccgtctccctttcgtctttctcgcgcccgcgccgcgggaggaggagcgagcccttctcggaggcagcgccgccgcgcagtcgggcccaagcaaagcatcccaaggctcgcgcaaagctgccgtcctccgagcagactgcagtgtgcccggacgagcgcgggctggtctaggtcctcttttctcgacgctcgctcgacccgcgtgagcccgtcgtgcgaggcaggctggcggagctctcagcgcgggccagcccccaccttcgcctccgcgtggccacgagctcaacccgagcgaaggccctccctcctgcctgacgtcgaccaagccctctcaccctctgctcaagagcagtccctcagcatggtcggtgccaccacacgctcccgcgcaagcgttcagcatcaggcgtccggctcgaccgcggcgtggccagaagccggcccgtctgccgcgcccggcgccgccggcgccgtgcctcccggacctcatccgaccggcatcgcacccttgtccgcctgaccgcgctcgcgtcggccaaggtgcgttgtgccgctcctccactgcgattgagacttctggctgatgctgctgctggctctgctttgtcgagcagccttccgcatgagctagtctgggcggtcctgctctgcatggtcgaggacgaccggccgttgcagtacgagacgacgctcgttcaggtctatgaaaacgactacatcaggctctcggcgtgtatgccgcttgtggaacgcacgtctccatatgtggctcatttgccgcggttggccgacgcgctcgcgagctgacttgccgcggttggccgacgcgctcgcgagctgacttgcggctctcgtgcctcgtcgtccgcaggacgttgtactcgacatcctcggcgctcgactggccaactgcgatgacggcctgggtagacaacttgcccggcagcatcgagacgataaactttgaggggacctcaaaagcgggcgagcggtaccacgacgacctcgtcaaccagctcgagcgacgcttgtcagatctcttcctgctgccggagcggacgctcgagacgctacagagcgtcaacatcgcagacccatgcctgcccgatatcgaggacgactacgaccgcgaggacgcctccgacattccgtactacgcggacgtcttgcaattactgcaggacctggaagcggtcggcgtccagatcctcgaccataccggcgtgcgctggaagaccgagcgcttcaaggccgcaaacgaggttgcgatactggaggcagcgcgcgagcgtttggccatcgacgccttcaacctccaggtggcgactcagaatgtcaaaaaggcgtcggccgctgtctcgcgagcgtcgcacaccatgtcggtggcgacgagcgacatgtcacggacggcaagcgtgctgaatatcgctcatgctcgccacgccgagtcacttaaagctcttgccgacctggagcgtgaggcggccgcgagaaagtcgctcctggtggtcgatgcatgctcccttccttgctccctgcgacctgcccttcccgcctggcggacttggaagcggtcagagaagacgtcaggcgaagtcgccggccgacttgtcgagggcggcgggcgtctgctgcgcatgcgcctccaccttcgtccggccatcgagcctctccgacccaccttgccaccaacttcatccgtctcgacctcgcacgtcaactggcttcctatctcctgcccttcagctactgctctctgccatgccgccgtcagaccagccgacgggcggcacgctccgaagctcgtccgagacgccctcgctgccaccgctgcccggcatgacccggatgcccaacggcgacatcctctcgatcgagggcatcgagtttggctcggacgacgacgacgacgatgaagactacgagacggcctcggacgacgccggcgaccgtgcggacgacgtcgagtatggctacggcgacggcctgacgctcgacgagatgatggacgaggctgaggcgatggaggagctcgaggccgcgttcggcctgaacgaggctgacgacgacgacgacgagatggttcactcgatcgacgaagacgaggaagatgaggaggacgaggagggcggcagggcgtcggctggcttccaagggagcatgcacgacctcgtccaaggcgcgtcgtccgatgggctgctggagttgctcggagcgaggcggcgcgagctgacccaccttccttcacctgatcgcccgcccgccctcgtccaatcttgcctcctcgccgtccgttcacaggcctccagaacggcacggcacctccggcgctgcttgcccagcttcgctctcttgtcgctcgatcaggtggcggcggtgggccgcggcagatcacgatcctgcgcaacccgctgacgggcgcactctcgctctcgatgggcgacgacgacgacgacgatgacgacgacgacgacgatgatgattacagcggcaacccgtacgccgcaccggcaccagcgcccaagagccattaccctgtccggaccgagccggccgaggctggtctccgactgcggtacggcggcgagttcggcccagtcggacgcaagctgggtggcgggctgtgccgtcaccggcaaggcaacatcggcgatatgatctggcagcgcgagagcggcggaggcctgcggcgagcggcctggaaggacacagccaaggtttgtccgtgcctgcttcgtcagtggcagatagaggcaactgactcacctgacctgccgcgcaggccctcgtgcccaacacgcccggtacaatcgtcgccaacttgacggcgccgccttactgcggccagtactcatccgactcgtccttcttctacacggcgaccaaggacttccgactcacgatttttggcaccgactcgagcatcacccgtcggccgccaccgccggcgccacgcccgcctcggcggacggtccgtcgcggccaccacggtcagctgatgcaggacgacgacgacgatgctggcgatgcgggcttgtacgccggtgcaggtcgcgtcggcgagagctcggcgccagtcgtcaagaatttgatgggcggcggccacgggtggaccgtcaccgatgccgacctcgccgtcggcgacgagttcatgatctactcgagtctcgtacgtccttgcctttcctcatgcgaccgagatcgaccactggcagactgactggcttttgttctacagacgccgatcgtccgcatgttcaacacgcgcgagcagtcgtccgagacgatcccgctcgacttttcggcgccgttcccgggcgaacgctaccggacgtccgagtacatgcgcgtctggagcgtgcgcttctcggccgacgggcgcgagatcgtcggtggcgcgagcgccgacggcaactcggagctcgagggaaagatcgtcgtttacgacctcgagaagaatgcgccgacgctgagcatcgacgcgcaccgggaggacaccaactcggtctgctgggccgacaaggcgtcgaagcatatcctctgctcggcctcggacgacggttacgtcaagatctggtgcgtcagcctgctgatcatttgaagcgcgaggctctggctgacgcttctttcgtgcgctaccttagggaccgccggagtttgagctcaggcaaaccgagtggcgtgctcgttggccacaccgagggcatcacctgcgtctcgccgaagggagacggtcgctacatcctctccaacggcaaggaccagacggctcggttgttcgacttgcggagcatgtcgtcgccgtcggtcacccagtcgacgccttcggccgctcaccggtggggcactgtgcgtcttgaatcgcagctctcaagcgccaggctgcaactgacgaaccttcctcgcgcacctcgcagggctgggactaccgcatggatccctaccgaaagccgcgcttccaggcggcgccgggcgacaacagcgtcatgcagtaccgcggccactcggtcagccggacgctgattcgcgcgcactttgcgccagagaactcgaccggccacgactacgtgtactctggctcggccgacggccgtattcacatctggaacctcgacggcacggtcgtccaggtcctcgaccgccggctgacagcgccgctcgtcgataccgagaaggagggcgtctacaacgacccgagtgggcccgagacagcgcgcgagcgggcgagcaacgcaggccgcagcgcctactgcgttcgggtgcattcgcgcagagacggcttcggctcagaaacggccgctgaccctcttcgtcccttttgcaggacgtcgcgtggcactcattcaaacccgagatgatgagcagcgcctgggacccgtctggccgcggttcggtcgccaagcacgagtggaagggctttggcaagcacagcgtgcgttttctgtcggccatgagaggctaagggtgactgctgctgacgatcgccattcttccggcccgacagatgacgatctcggacgtgctcgaacgcgagcggcaggaagcgaccgcttcattctgaccctctgcttccgtcgccatcttcttctgctatgcacggcactcgagtctcaatgcatttgcttttcgcccgctcgacctttgtattcaatccctccgccgtctctgttgtaccatgcacatttgcccgcgctaagcaattgcagcctagctcagcggccgcgatctgagtgtacgtcggatgattatgagagaatcgttgattaaagggtcgtcaagagtcgtgagaaatggccaggatgggctgccaagacagagatttggaaagaggtcggcacgtcgatcagctcgaagcaacggcggtcgaatgcgaatgcgaacaagaaccgaggctcatccggcgacgcgaaatgtagaaggcgccgggtagagtgtcgagtcgaggcgcagaaccgagaggccggagcctaactttcttctcattcagcaagttggccggtcacgatagcagctgccagctcagagtcgagcaggccagaggcaatcgcgtccagctcgtcggcccaccaatagctttctttgtccgagtccaaatagagcatgtgccccgagtcgtaatcggcaagctaggctgacgccgcggcctcgtcgaaccagtcggcgccgacctgcgacggaacgccagtcgagtcagcctgcgcttcaaatcgcagatggtaggcagcacagagacgtacccgctgcacctcggcggagacgtcgagccaccgatagtagggtccgtcaaagcgctggacgatcgtctcgcaacggatgagctttacgaggacggcaaaacgcagcctcttggcgagtcgccaaggactgtcgcccacttcccacaggctgatcctgtcagcccagcctcgtgggcgtgtggtgacgtcccggtccttcaggttgtcgaagtggggcagagcgacggagacgagttcgggcaggtcgtagaggatggcaagagcgagaaccgtgggcgaatgcgcttcaacaaagagggcgccatggctgcgctgtatggtcgtctggaggccgtaccgctcgccggtgaggcagaagctgtgatgcaaagagtcaaagtcagttgtaagcggtcggcaccgtccagttgacgacgcgacgcacatctccagcagctcgagcgtcagaaatggcagccctctggcctgcgggtacatgtaggcaagcagacgagcaagaaccgggcctgggatgtcgaggcggacgagagagttgatcttgccgtttccgtccggcggaggcaggcttgagttctggacgatcttagacaggaccgacaactgcgagacaaagaacgccttgtagaccgcgatgtcattcgagccattcgaaggcaggacgccaagcttggcgtgtaggccaccaaaggccggcatgtcgcggatattgaaagaccaaggatgggatggtcgcgccccctcctcgggctgatgacgtgcgggagctcgagctcgaggcagagcgcgacgactggctcgagctcttcaacctggaagaaaggcttgtcgccgacggccggcgcgaggtagaggaggactgtctcgacgacggccctcagccgcgaacgggacgacaaccgacgccggctggcggtccgcctgcttgtgctccgtcgaaacaaccgcagccttgccagtggcggcggtcgttgtcaatgcagcggtccaagcggccgcgacggtccgtgcggcgccgaccagctcctcgacacgctccgacaccgcatcgagctaaagcgcgcggtagccgaacgacttttcatcggaggccttgacgagcacgttgctctttggagagctgaagagggcgagcgagacgccgctgttgaagttgtggtcgccgcaatgccgccggcagaggcgaaccaagcggggctcgaggcaacgagcgtcggcgaggtggaggcatcttcggaggacgtctcccagtcaaatacgctggcatgcgacatgctggagcgagcggtagaagcgatgagcttgagctgagaaggctggaggtgagacgaaagcagcagttcggcgaaagggaggcacgagagggacgatgaaggggaaggcgcagcaacgtcagctccggctgcttgatggtctgctgttgccctgggccagacgaggaggggtgtacctgctagaatgacttgaacagcttcagacagtctgcttgggtctggtagggcggtcggtggtggttggtgggcgagaggagaaaggaagtcaaaaggggtccgctcgagtgaaagggcggccgtcccgcctcttgcttgcacgggcggccatcgcccgacgatcctcgccgacgacgaccgggcaaaatcagcttactccgagcggactggccgagtcgtggcctcttatgccagcccgaacgagccagtggttgcatactgacctgacccgtcaaggctagtcgcggctgctcggccgtgcgagcgaccggccgacaggagaccccccttgcgtcttcgttcagccgcccagccgggccgcatccgcttttgaccgctcggacctgctgccaagggcagtcaagcgcaaggctggccagaggcgtcctcgactccgcgctcggcgccgccgccgccgccgctgtctgacaagggcgctcgcgttcgtccaccggcctcaaagtcatcattggtggctaccggaccggacctcgactgagatgtctgctcattcgccttcgatcgagcgagacggtcagatgaaagccggcggcatgccccatctttcaggcagcagaggcccagaatggtgtcgctctacgccaaggttgccctcgagacttcactcactgtctgtcttctctcttgtgctcagtattctgccgcatacgagaacgtccttgtcaagcttgaggaggacgggcagcttgctgggggtcgaggggctgggggcagctgcgcgggtggcgagttacgctcgctgtcacggtctcctgtttacgatcgttgcacgcgacccgactgtcggcgcgcgccctccccctctgcagcgtaggagggggagagaaggctcgttgagggggagagagcaccaagcgggctgagccgggccatcactgtggggtcacccccgtttgggcagcgtgttgcccaatttgggtccaactgggttcaggacagatgactgggcacaggcacactcatcgtcgagcaaagacaacccatgaggcatagctacgacccaaccgtcgccatctgcctctgctgccgctgctgctgctgctgctgctgctgacccgcctcggtgctcagccccgccgcctgccccccaccgacgccaacggcaaacgtcgcccggccgctgaccggcagcacctcgaccccctcgagcgcatttacgaggaacgcctcgctcgacagcgccgtcccgtccgctctagagggcgcgagccggacgagcgggagcgagagccggcctggatgaaggcctatgagcgagaaggacgacatatggggctttccctcctgcggcgcgcgacgacgacgacaacagacttgtgtcagcgagggcggcgaggtcgaggagtcagcgagggggaggacgcacctcaacggcaaacgacccctttttgcggcccgagacgagccagtcaccaacgtcgacgacgagctcgtacgccatcctcacgccgacgagcgtcggccgacttccctcgtcgtcgccgccgccgccgccgtcgccgcctgcccagcgggccgagcagtcgatcgtcatcgtgcagctgagcggctggccgaccgagacttggccgggagtcgtgagcttgaggctgacggccgagacgatctgcctcgcggtcgagtgggggagtcaggtctgacacgggcgggcggggcggcgacgtgcgtggctggaagggaggggcgcgcacctggcggacggggacgtcgaccgggatctggagcgtccgccacggcaggtcttgggggccctccatcggagcgacgaagtcgtcaagcgcctgcgtcaaggagcacggaaccgatcagcttcgaccgggtggggtccctgaagaacgcagcaaatgcacgtcgacgacagcttcccagacctcgacgaccggccggaaggcgtcctcgtacagaccgaggcttccgccccagcgctcgagatcctccagctcgacctcaggcacgtcgaccgtccctctcgcaaaatacgcgtcggcccacgccggctcgccacagacacagccaaagagcgtatcaacgagccaaggctcaagcggtgtgagattgcgtgcggcgaggagcggccgggcgacaagcgcgagcgtgtgccggagctcttcggcgagcgtccggtagcggatcgtcaggcggagcgtcttgtgcgctgtgagagaaggaggaagagggggtaagcgtcagaaggcgagacgaagagaagggccaagggaccgacgcagatgtgagggctgcttcgcagtcatgcggaaggaacaggtcgccgggcagtgaggcgagacgttctacgcgcagacagcctagccgtcagcccggaaacgagcgagtaatcaaacttgacgggcgacgcacgaggaccgggctgctgtcggtccgacacggctcgatgtcaagcgtctcgtctgagccgctgagcgctgcaccggcgacgcgaaggtgatgccggccgtcagatgagatgctgaagcgagagatcaggctgatcacgaggacggctggttagctgctgtactctggcgagttcgccaggttttcaacgagacggagcgcaccaggtgtcgcggaagatgtcctggacgttgaccgacagcggcaaggcgagcacgagcggcgttgccttgcgcaacgcgcgcttgaggcccgcccgcttctccgtccagtagtcgacgctgatccggacggtaaccgaggtgccgcgaggcgtgccgcggtacgggacggcgaggacgacgagcgtgtccggcgcgatgctctcgagcgagagcatgtcggccgaggcctgcaggctcttgatctctgtaggtagccggcgtaggacgtcagcagccaacccagacaggagccacggcagcaagaccaggacgaaccgcccgagataagtttcgcgtcgcgcaaaccgagcacgagctcgtcgtccggcactcgaaggccgacgatcgccttcgagacgacgttccggcctgttcgaaactggagatggacgaccggctgcgcgtcgagcttgaggtcgagcggcaagacgacctctgcatcaaccgagtgggggtcccgcgggatgcggacgagcacccggttgtccgagtcggtgatgcgcgccgggatccaaaggtagtggaaggcgactttggcaaagcggacctggctcgactcgaccgtccagaggcccgagacgggcatcgggcagtagagctcgatgacgttttcgccaggcttcaggctgacctggcccgatgtgaaccagagttgctcgatatccttgccagaaaggcaggcgcgcacgtcgtccgccagtacgtcctgagcaaggcccgcagcgtccgtcagcacgaacgtctgctcgtcgagcgaagagaaagaactcacgctggccaaatgattcgtcaccttgaccttgagcacgcagccgtcgccgtcgtcgggcgagggccgcgccgccgacttgctctgcagcttgatggtgaaggccgcgtgcccgtgcgctgcgacctctggcgacgagcgggacgggtgaatctccgcgtcagcgaccgccatcgcctccagaaatgatggcagaggacggacccttctccagagccttgccggcctcacgcatgtcggcgatcagcttcccaacgaagctcgcgagcccgcctgcctcgccctcccagacgctcgcttcagaactgaagccaacccggacgaggcaacgcaggagagcgaggaccttgccaacccattccgcatctctggccttgccgagcaagctgtgcgtctcgagagccttgatcaggtagaaggcttcgagcgcggtccagttgtacgccgagaagcgcgaggccaacgaggcaaaacgcaagtaggccgactcgtaccgctcgcggcaactggcgcgtgcagggagacagaccagggtgtcagcgcttgtcaacgagggggcagtacacaagactcacaggtcaaccgtgccgagactgccgatcaggacgagtgtgcaccgctccttgcccgtctgcgaaaaggtgtcaattgccttttgagtgagctcgtagaagaggacgtcaaaggcctccttgttgccggtggccacaagcagatcgcgccgcgtgatcgagtgttcgtcggcggtcgagacgggcttcaaggcaacctgaagggcattgaaggggtaagacggcggcaggtaaccagtctgcaggccgatcttgtcgagctgggtgttgcgaagggggcacgtatgagtcttcgcggtcgagtgttaagtaacgtcttttgcgacggacctgaattctggccagggtcaagagctcggccctcgtcgccatgatggcacgctcggtggcagcctcgtctgctgtcaccgactgccagccggcagcagtctcgataacgttcaggcacgatgagaaaatccagctgcagacaaagttgagcggaagctgggcctgtaggttggcgggtgtcagcccggcgagcaggaaccttcgcgagggatgcggcagacgcaccgcgctctcctcgagccagcggccaaagctgctgatgaactcggcgcctttgcgcatgccctcggctttgcgccccagccggccgagcaacctcgcctgacgggcaaaaacgtaaacgcgaaagtcgaatgtcgagatccggtttgagaggatgagctcgtgatagggcttggccgtcggcgagagtatcgagagcgagtcctcattcgtcaggggcgacgggaagagctgcgtgaagaacttcaggttgccctctgcgcaggcaagcacaaggcgtcaggtcaggcgacggtcaggcagcagacttgttcaagacgcacctttgaggacctggaaaaaagatgcctcgagctcgttgtactgcatcagcgcgtcctcgatcaggcccatgccctcgaacgagtgcgcgagcgactcctgtcaaggcgaaggcgccaagagcacgtcaatcacagccgcgcacacacctcagagcacgcgtaacacgtaccttgaggaggaagaatgtgcagaagttccagccaggcagggtccgcatcgcctccatcgtcttgctctcgtcttcgcgctgggcgacccgggcgtcaaaggccgaaaggatgccgtcctttagcttcgaggtcaggtccgtccatagcgccggctcgtcgggcgccgggaaggttgggcgtgagagctggacacagctgctcagggacgacatgtcagaacaggagtaagcgctggcgagcggctgcgcgcgacgagacgcaccggtcgcgcttgccgaggttgaggtcgctcctgatcttgtcgatgacgctgccgccgacgccaaagaagcgaccggcaccgctggcagcacctcgggcgaggtcagccttcacgacgtggacgaggagccactcctggcccttgcgattggcgacgagcgagtgccatgacttgagctgggcgcgggtggtcgtcttgtacgtctcgttgtcctggggcgtagagtcaagggtcagcgcgaagcttgacgacaggaccataagagactagacgcacgtcgcagacgacaaagtagaggttgaggaccggccgctcgagcaagctccttgggaccatgcttcgcgagccgtcgccgccgtcgacgccgctcgagctgaggcgcatgctcgcaggacgtgagctgctgctgccgccgccgctagcagcaggggcaagcgtgtcggtgctcgctcgggcggcaagcgtctggacatcgagcgggacgagctcgacatcgaccttctggatcgtccggaccgacgggcgcgagacgggcttccagtggaggttgcgcagggggaggtgcgccgcccggaagaccgaccggatgttggaccactcgggcgaggtcaggaacgcaggcgaggccgagtaggtgcaggtgacggccgcagcgcctgcgccggggtcgtccatcgttctgctgcgagaagaggggaaagaagctggcggtcgagagctcgagtccatctcgctgctcctgtcggcgcgtcctcgaaagctgagtcgcagcagagcgctcaccgcaggccctgaccgagatcctcgcctctgaccgcaaccctccctctcgagccatgtctgagctcatcgacggcagtacgttccccgtctgtgctcgcccgagagactttcttgctgacttgctcggctgggcttcaccagactcggacctgatggccgctcttgcgagcctcggccagcacccgagcccactctcgaacggctcgcacggcggcaacggcctcgttgacccagccttgccaccggcaccgcagccgagcatgatggatcagcatctgcttggcccgcacggccatctccagccgacgtacctgagctataaatcggcccacctccagcgaacccaccttcaacacctccagcagcagcaacagcagcagcagcagttctacggcccgtccgactcgtcgatccaatttgactctgcacagcagcagaacgccttccagcagaacctcgtgagcggaggcggagggagcgtctttgcctcgccgccgctgggcgggctcggcggccacggtctgcaggggtcgcactcgcccagccaggtcgcacaccacctagacccggctgcctatcagcaacagccgcagcaccacgacgtcgacatctatgcggacgcgcatgccggcccatcctccgtcggtgggcagcagccgacctactacgatggccagcttgtcggcggagagctcaagtcgcctcacgacgcaagtcatctcctcgcgccagtctccgcgactccagcacctccgacccgctcttcaaagaaaaagaagaagaaggtccggccgccgccagatccgaatgcgccgccgccaccgccaaagcggccaaagccgctgcccaagaaggagctgccgccgccgccgcccgggtccgagaacggcgagtcggacggcgcagcggccggccttggcaagccgctcgttatgccaacgcacaaggaggtccacgccatcattgacgagcgctacaagaccctcaagcggctcttcaccaagaaagctggtctaacgggcggcccaggccgaccaccgacgaagcgtgcgtccgcgtcgtcgcctaggagggcggattcgccgctgacgagcctctgcgctttctttccgtgcctcagcccagccgagcatcgccccagagattgtccggctccacgagatctttccgacctcgcccgtcctgccgtacttgacggccgaggtgacgctcgagaagcccaagacgctcctctcattcctcggcgggagcaagacgaccaagctctcgcgctcgtcctctacagcgacgtggtacgtctggtcgctccgggagctccgctcggtccgcgacggcctcaccgagctccaccttctcgatgagggcacggcttgggcccggctcgacgacgagcagcgggccaagctcgaggcggtcgagcttgacctcgaggacgtcctccacaaggtcgaagagggcatgctcaaggtctttgacggcgtcgtagaggcgcgcgaggacgaccctgaaccgggcgaggaacctgtccaaacggggctcgagtcgctgccgggcaacggccagttgagcgagtatgcccggctcggcgcctatgccgagaacctctacatccagcaggtctacgagaaggcttctgaggacgacaatgcggtcgcttcgagctccaaggtggtgcgtcctttggcttcgtcctgttaccctcccggggctgcctctgaccgtgggctccgtccctcctttctatagcagatgcacacaggcccgccgcccagcctagccgagctgcggcagatgtaccccggctcggcgattctgccgcacctgctcgcgaacctaacgctcaaaacggccaaggtcatggtcaactttctctcgggcgcgggcgtcacgaagcggacgccagacgaaaagactcggtcgtggtacacgaaaaacatcacgtcgtaccgccacatgtcgctcgccctcgccgagatgcgcggccacaagacgacatgggacggccttgcgcttggccttcgccggcggcttgagatgctcgagggcgaggtcagcgagcggcttgtcaagctcaaggagggccgcttcgaggtctttggcatcagcgacgacgacgacgagatgaagggccgggccgaggacgaggcgcacgacgaaggcgacgacgacgacgacccacacggcggcaacggaagcggcagcggcgaccactcccacctcctgcttcaccacgaccaaggcggccagcagctcgaccagtcgcaccttcaccaacagcacaacgagcagtacgcctcgctcggcggcgacccgggcgcatccgacggcgtcgacggcagctatccgcaccctctcgaccacgagcatcaccacggcctcgagcacgacgtcggccagctccattcgggcctcatcgacccgtacagcgatggcgtcgttgacgtcggccagcacagtctcccttgaacgccctcctcgcctgctgtcggatcatcgacgtcagatagtctgctgtatcatcccatgttgtccctctgtcttgaacttgtggacgggcagtcgcctgtctaaggggcctgcaggcgacaaggaggcagcaacaggaagtcgtagtcgtcggcgggccggcgcgcagcactgccggggccggcggttgagctgcctcgcctgaagcaaggcaacagcgagtcaaggtttggattcttgaggtggcgggcagaacgttttcctgaatacttgagctctttgccttgctgcgagctgtagggtacgtgtacgagctcgctgggccgaagccgccgtcgttcagagtcgcaacagatcgagctcctccggccgaccagtcgcctgcctcctaactcccatcgacgcttccgacccacctcagctctctccgaagcccgcctttgcttggatgctctctctcgcctgtcgctgggcccgaccgtcacgggcactccttcagcgtgggctcgcttatgctgtcaccttctcgagctcggggccggactcttcgcgatcgctcgtcgccctcctcgaggcgcactcggccgagcagtcggccctcgtttctacctcgtcatctggaaaggcgcctttcgaagagccgacggtgaccgtctttgcgctctcgcacgacgtttctgacctcgccggcgttctctctgcgattcggcggcgccatcctaatgcgatcggctgcctgagctcgccccaggccgaagggacgagctcgctcgccctcgcccacttctttgacgacgcgaccgagcgcttccgactcttccggagcaaagaaaccggccgggcgtcaatctcggtcggccactggcggcctttgcacgagcttgaggccgatgccgcaggtgagagcgcagctgtcgccggcggcgggtcaggcatcgacgaggatcgtctgcgtaaggctttcgagggcggcgactggtccggaatgtggggcgatgaggcgatggccaaggccgaggggacccagacggccacgctggagggtctggaggatgcagagtgcgtagtccaacgagctcgacgatttgccgtcaaccctctggtcctgatgactttccgctccctgaccgcgcagcgccgccgccgtcactgccctcgtcgtcttcgcaacgccgtcgagcgcgacgccttttgtccagcaagtggcagacctctgcccgcaagtgccgacgacggccggtctgctggcacctccgacgccgttcactaccggactcgcgcacacgcttttctggcggggaggcgagcaggttgagagcggcgcgatcggcgtcgctcgtcttgctgtcgacggagcgacctcgagtcaggagtcgtgggcgattcgttcgggatgggcaggccttgagcctgtcaaggagggcgaggtgctcgtcgttgactcgtaagtcttgacctgcctgatcgtttggcaacacccgctgaatgcctcgctgggagagcactttcgtccctcaggtgtcagggcaatctcttgctgtcgatcgagcctggggagggtatcaacccgaatccaacccgtcagctcttgtctctcctctcggccgcccatctgccacccctcggcaaggacaaggactttttcctcggtttcctcgagccgaagtcgtcgtcgtcgttaggcacggcgggtctcaggcgggtcgtgcggatcatgagcggcgacccgagccgcggcgggatggcgcttgactgcgaagacagcctcgacaagggcgaccgtgtagccgtccgtcctcgccgttcgccgtgtgaggaccacgaagggctataagctgactcgtgaccccccttccccctgccacttcagttcctgcaccggcctgagggcgccctggctgcgtcttccaacaaggaccggcccttgctctccttttctagtccgtcaccacatgttcgctcatcgccgtcgaccgagggcggtcgggtcgagcacggcgttttccgagcggcgtccgaggcgggcgtcctcgtcggccagacggtcgagcgagtagcagggagctgggtggccgtcgacaagggacgatctagatgagctgcccgccagcaaacaagcaggtagagacccgttccgggcaaggatcttctgcagcatgcgtcgtcgtcaggccggtcagaatattgagactgctgcgcggccgatttcggcccctcggcgcgagaccccgtcgtcgtctcctcttgacaactccgaccgtcgacccgacctcttgacgggctcccagcatctctcgttccttcgcatctcgctcattcggcatctttcgcatcttctcgcacgctcaagcagtttcaagcagtttcctcggctccgtctctcgcccagcaagctcggcctcgtctcacgcgcaatcccgacccgaccctctctgtctccctctctagctctcacacctctcgaaaggccctacaatctcacctcgctcacatgtcgcatgtcctcaagcgcagtcctcctatccactggtcgcgaatccagtacgggaccgcttggtgggtcgctatcgccgccaccgacagtcggcggacctgccgacactgagctgtaacccgaagctgacgcgctgtgcctcatctccttccgactctgcaggaaagaggagcggacgaccgacctcgtcgtcaatgctgttctggccggcttccgcacgtccctttcaaagctcggcagccgagctcagaagacagggctaaccagcacgagcgtgccctctttcgacccaccaggcggcatcgaaacggcctcccagacgcgcttctaccggttcgtctctcttcctctttgcacgaaagccctcgaacaagaacgctgacgtcagcggccttgcacaatgctccgccctgcctgttagggaggacctcgtcggcaccgcgctcgcgcagctcgaagataagcacaagatccctcggtcagacctcttcgtccagaccaagtcagtccgcagcgagccatcagcctgctccagtgttgtgcgagagcatctatcagctcaatgtcccatctgacacgttgctttcgcccacagattttcgccgctcagctcgcaggaccttaaaggctttctgccttacgacctcaaggccccgctcgcgcagcaggtccgccagtcggtcgaaaacagcatcaaagctctcggcagcgagcccgactcggtcgtcctccaccgcgagatggaaacggtcgatgagacgctcgaggttctgctgacgttgcgcgacctgcgcaacgagggcaaaattcggcagatggtcggcatcagcaacgcgtatgatgccggtcggctggcgaccatggtcctccacgaggccgagatccaggtcatctcgaaccgctggcacgaggccaacgcgtgggaccacgaaattgtgcgtatcgctctgactcgctcgtcgaggttacggccagaggagctgactctgcccctgcttcagatggccaccgtctcggagaacggtcctcgcagagccggctacctgcgcagcaaggagcacgtcatgtatcagtgcgtttgctcgcccggcgaaactgactctctccttggcgcttgagggctgatggtcccctcccgtcttccaaggggcttctggacgctcaccggctcgcccacgctcctcgagtcggaacctctgctcgatctcgctctcaaaaagggcctgacgccccatcagaccgtctacggcctctgtcagctgtgcgtctcgcttttcgattcctcacccgtcgcacttgacgtcgctgacggcgttcgcctgctttccttccagctggggcggcgtcccgctgtgcggcgcttgcaccgagcagcactatcgcgaagccctcgaggtcgacggctcacagtggcgccctcaagacggcgaagccgtgcgtatgtggatgcgggcccacgcggctagcatcccacccccgccacccgtctgatagccgtcgacgcccttcctgtagactaaaccacccgcatccaagcgtcccgctcaccccactgtatggttagttacatgtctcttactctcgcgtgagtcggaccaaagaagagcatagagaagagcagcagggcgaaagcgtcgtaaggtacggtagagaaaggccgaaagcgggtgggcgtcagggacatgcaacgaggaacgaaacgagaagaggaaggcgtcgtgaaagcggagacgatagcggagcaggaccaggggagagagaggggtgtccgtcgtgaagcatagccgttgaaggggcgcaatgcaaagagaccgagtgaaaagggtaaagcaagaaggtgatgagggaatgctgggaggggctgcttggcgcactacgacctagtcccgacggcggctcttgcgagtcgagccccgcttgcgagaccggccgcgagcatcggcatcgcgctggctgcgctctgcagagtggccgccggcgtcgtcgttctcgtacccgacgtctgtctcgtcgtcgtcgtcttcgccagagccggaccagcggcccttggccatgcgtgagatggcctcgtccgagaggttgagcgtccgaggaggaagaccgcgctcgaccgtgtcgggcgacgagatcgcaaagatcgggatccggacgtacgccgccgggatcggcgggaccgggggaggagggggtcgggtggccgaatcggccaggagggcggctcgtagggacttgatcgaccgctgtgccttcaggggccggggtggcggcggcgacgacggaggagaaggcgtcgacgggatggctactgagatgtccttgctatgcgacttcgttgccccggaccaaggccagccgccggcgggcgagctcgacaatgcgggcgaaccgttgccaaagcgccaggccttggcctcgccatactcggcgcgaggcgtcaaaactggaggagtacgcggcgcggccgcgtcatctacgtcgtcattatcctcggggaagagcgactcgatccgtgtcgctgaaaacggcggcaggtcatcgccctcatccgacacgcacgtgacgacgtgtttcgtcacttggccgggaagggcgacgcctcggagcgacgtcgtcgacggcgcggacgacattgcctggccgaaggccgggatcaaaggccgcgtgcggaggccagtcgacggcgcgaccggttcagtgacggaccgcgcgagagcgaagcgcgagagcgaggcgaaccagccctcaggcgcctttccctttgcatccgaagctgggctgatggtcgccgtcgcgctgcaaagaaatggcgtcgaggcggcgtggcgaagtgccttgcgtactgtcgtcaacggcggctcctccgggaccggcggagggggcgggtggacggcggcgaaggcggccaggctgacgagtgacttcttgggccggacggtccgagtcgaggttgaggcgagcgacggcacccggcgcagagtcgtctgggaggcgatcttgcgcaaggagcgagccgcggccgacgacgcgtcgtcctttaactcggtagacgccgggatcggtcggggcgaactgtcggcccgcgacagagatggcttgccggaccgcaagcgcgcctcggtcgagtgtcggtgaggacccgaggttgagctcgcataagcgtccgacatgccaaagttgcggctgtagtcgggcggcgagtcgacccggacgcggacgaacgtctcgctcgcaagctcgggcggcgacgtgatcatcgtgctgtcagacgagacggtcgacgaggccgacgagagcgagccgcagtcgtcggcgggcgtgtggcggccttgaccgccttccgtcgtcgctggcgcgtcagaggcgtccgtcgtggtgctcgaaccggcggcgaacgtcagaccgagggcagacccgcgggtccggagcggccgcacaaggccgtcttcgaggagccgggcaccttgcgcccggccgatcgaccaaccgccgaaagagccgtccctgctggcgtccttcttcttcggctgcgctggtggcgggctgggcgccttgggaggcggcgcctggacccgcgcgggcagcgcctgcatgggagggaagccggccgtcatgccgccatcgtcgtcgtcgtcgtcgtcgctattgccttggaagagcagccgctcgacctcggccgcctcggcccgctcggcctgagccttctcctcggcccagagccgctggacacgctccttgatgcggacggcctcgggcgtgatgaccctcgtctcggcgtagccggcttgggcgagcagctgctcgagagactggtactggtgcgaagtcttgcccttggtcgagggaggcaggttcgacttggtcgagtctgccaagggtgaaggacaggccctgctaaggtcggcagggtagggtgatgaccgcttgggtgtggccggctgctggagcgaccgagcgacaggggagggtggcgaggagtcaataggccgctctctttgcgctctctcaatccaagcgtttccatgtcacgaggcctgaatatccaaggccgtcgtgcctgcctttgcgggcagtctcgacgaagccaacggggcgagccagacgacagagagtcaagaggaggcgcgcgaacctttgtcgcgtggtcgggaaggctcgtcctgcctcggacggtcgccatggcgagctctggctaacgcctggtggatgcttgccgagccggagcaggagtttcgcgaggggccgaggggtattcaggggaggagcagaagtgttgggtagaggtcagagtgtgggcggcgagaggttcggaggaggcgcgacctgcaggcgttgttggcgccgccgctgggagacgcgccacgccgcctcaaagaacacgcgcgtcctctcgagctcaagcgcgcccgacccgtgaccacacacgacgactcgagctcgctcgctgataccattctgatgcccaaaaagtaatccgcgcatcctcatcgaggttgtaaagagagacgcagatgagggcccgagtctatgtacagcgccgcccacccatcgccagcctctactcgatgacgcggtagggccgcttgtgcttgtacctgcgacgaggacaagggagggtcagcgaggctgcagaaggttcggatgatgcttgatcgacgtacttggagccgatgtgagcgggcttctgaaagttcttgctgtcatcggcaacgaggggcagacgttagccgtccaagagcgagacaagtggccggtccggtcgaacgagcaaaggaggggaacgcacgccgaccgccagaccttccagtaacggatcgcctcgccctcgagcgtgtcgagctcggccatgctgtcgatcgcaagcagcgtctgccagctcttctcggccgagatgctgccgtcagtccggttacgaagcgcatagtcggacggctccgaaatgtactggcgctcgacgaggtcgccgtcgatgaatggccagaagagggccttgttcgagacgttggcaaacgtcttgaggagcgccttggggtagtgctgcgtcgtgggccagggcttttgcagcgtaaactcgcggtagagcgccataaactgggcgtgcgtgtacgtcttggggccggcgaggttgaacgtctggcccgggcccgacaagtcggcgtccatcaggttcttgagcgcctcggcgacattgagcatctgagatggagaccgggtgcgagcagtgcatcggtcagttgtagcgagcctggcgccttccaagcgtgaagacgtacgtggacgggccggatctcggtctggccgtggttctgggcgtacaggaaggggaactctgagagaggggacggaaggtcggtcagcaactgctgcgccgaactcacaccctcgaccggaacgcactgccaatgaggttgcagagccggtcctcgtagccaaaggtggcgcttggccggacgatggcagcctcagggaaggcctcccggacaagctcctcgccctcagccttggactgtcgacatgagcagagagaggcgaaggttaggctgggccggcgcaagacggggctgcaaggggtcgagacggacgcggtagagcgacgaggccgagttgacgtcggcgttgatgtggctgacgtggacgagccggtcgacgccctcctcgcgggcgatccgtgcaatgtcgccggcggcggtcgcgtgcaggtcggtgtaggagaagttcttggtctcgtagtcgcggccgacgaggttgtagacgacgtccgagtgacgcataacctcggccagctggtgcggcttgcgcaggtcaaactcctgcggacggacaccgcaagagtcgaggtcagccattagcgcgagcaagcggcagtgagctcgcatgcagacgaaccatcggcacaatctggcccaggtcgccggtcggccggagcacgcgcgcctcgtccgcgtcccggtaagggattacgacctgagtgccggccttggctgcgaaagagaacgagaaaacgacatgtcagcgcgacaaggacgcctcgcagacgagccgcggtcagagaacgaaccgagcttggcaacaaggtaccggccgaggaagccggtgcagccaaagacggtcgcgacgtggccagagaccgagttgcggccaccggtgccgtagcggacgacggtctgggagggcaggcgagagaaggcagggagcagggtggtcagctcgccgacgctcagcatgtcagccagctccggcctcagccaagcccgcacccgcccgccatcccacaaagcccaggcgcaggatcctccgggctcttcatctcaccaccgagctgcagctctaccactcgagtccgagcacgagaggagcaaggcaggacgtcgagcctgagccaatctgccctgcgcccattcgctcctcggtccgcgagaccggccgagagtgcagttctgaacgtacctttccgctcggcttgaccgcaacgtcaaaaactgtccgctgtgagagagaggtgcaggtcagcaagggcgtgtgaagattcgccgctaggctcctctggtcgagcagagaagacgcacccgagatggcccggctgcgctgggcgtcgaggcaggccggagcgccctgagcgattctgcgggtccaagcgttgcacgtcagtccctcttcacgcgagtgcatcacagtcctcgcttccagacgtacgggaacgaagggaggccatcgtcgacctaagaaagaagagaaggggaaggctgagaagggaggtcaaaaggaggaggagcagcagccctctctcgcggcgggccgagatcccttcgcgctcttcggcccgggaccctctcaacctgcatacccccgcctctgccagccgtttagggctctgaaacgctcaagacaggcaggccgaggaagctagtagaccatgaagtaaaagccagctcggacggcagctcgcctgcaggtagagaagagctttcggcccgaggccggccggtcgagcaggcaacgcgtcgttgccgaccccccgcccaatgcaggtcgaccttcggatctcggagctgcgacatcctctgctcggccgccttctgtctcctcctgctcgccgtcgtccaaaggatcgtctcgtcactcgacaagctcgcatgctgcgggcgcggtggtttacatacgcttcggacgcgacgtctttgagggtgggaacgaagccggcttctggcgaccaacgcgggtcaaacccggcgagcccagggcttctcggccatgcttggtcctagtggcgccgggacacggacgcaacccaacccaaaccatcctccccagctgctgatctttcgcttggctgggcaggctttctgcgacatcggcagggctagctcggcgcagtctgttctcagagagaggcgaggtagcgatcctcgagtcggtcggcggacgtggctcgtcgtgttgagccatctgccccagtgcgatggtcggctgactgcgctgaacccccctggcgaggaatagggggcgggtccgccttggccggaagcaagacgctcgtatttagcgggcgagcatagcccggggccgattgcatcccgatcggcttgccttcgccgtcacccttccaacgcgctggttggtcgctagacggcctcctttgctcttgttgaccgcacggcggccgatcctcggtctcgcctgaggcgagctctcaaaaaggcgagatgaggcctttttcccgcccgttacgtctccctcaaccgtccctcgcccttcccgtcgtcgccttcctcccgccaacacacgatgctcgctgcttccgctctcctcctctcgcttctcgccgtcccggcgctggccgtacgtccttcttcccctctgcccgtcttgctcccgatcgctgatgcctcgcccgcccatccatccaggtcgacatccccgtcgtcgtcggcggtaacggactcatcttcgagcccgagcaggtcactgccgctgtcggaggtgcgtctcctgatacacccccttcgccgtcctgacagcaggctgaccttaccgcccaccagacaccatcaccttctccttcgtcggtacacacagcgcgactctctcatcgctcgagacgccgtgcgaggccgccacggccaacgccttcaacgcctttgccccgtcgccggccacctacaccgtcagcgacaccgagcccaagtggttcttctgtgccgtcggcacccacgtacgtccctccggagtcgtctcagattaggcggtccggtgctgacgcaactaccctttgtgacgatacagtgccagatgggccaggtcttcgccatcaaccctccggccggccagtttgcggtcttccaggcccgggcccagggccaagaagcccctgccgcctcgccgggcatgagctcgatggcctcgatgtcctcgtccgccgctgccgcctcgggctcgatgatgtcgtccgtcgctgccgcctcgggttcgatgatgtcgtccatgatgtcgggctcggcctcgcgggccgcctcgtcggccgtcttgggcgcctctgccgttgcgagctcgggcggcgcggctgtctcggctgccgcttcgtcggctgcccctggctcggccggcttcgttgcggctggcctgccgtcgacccagcttgccgtcgccggcctcgtcggtgccgccgcgatgcttctcatctagagacaaggctctcgcctttccggctgcgttcgacaggacgcgctcggtcccttctcctgctcctgccggtctccccctctactgcaaacctcgtctgaaatgttgatatcaagtgcaagatcgcgctggaggtgcctcgagggccagatcaggcacggctggctcgcgagtctctgcctggctgctgataatcgcaagtcactgacctgaccgttttggcacaccgacgactgacgccttctctagctgctcatcctgtcgtaatacgacgtcgcggtctgaacgccctctccctcctcaggtgccttcttcggcccgccaggcgcagcacgcgtcacggagcctcttcgacgcgtccgaccgcgaggggctgaaaagagtcggctgaggccttttctcgcctgaccttcaacgcgcacttcccttcattctccttcgttccttctctcgcccgccaggatgctgttcgccctctgcctcgtcctgctcgcttccacgtctgcactggccgtccgtctgcacctccctgtgacgcaccggccgctgcgactgactcctctcctcccctctccaggcagaccacaaggtcatcgtcggctcgggcggcctcaagttcgagccgtcgtcgattcaggctgccgtcggcgacagggtcaccttctccttccccgggtcgagccacacggccaccatgtcgtcctttgcccagccgtgcacgcccgacgccgctgccgccttcagcgccgtcccacccggcgagacagacttctgggtggagagcactaacgcgacgtggttcttctgcgcgacgggctcgcacgtacgtcggccgttcgtcagttcactctcagcaagacgggcgctgacatgggggtcattgtctcctcgcagtgcgctgacggaatggtcagttgcagccttgcaacaaggctctcctctggctctctatcggtgactgacctcgtctgctgcgtgctcaggtcttcgccatcaaccctgccccagagggagaggagaagtcgtacgccaacttcaaagcgctcgtacgcccgtgcttctgaaacgcttcgtcccctgcatcggctcacccctcacccccgctcctgatcaccgcaggccatgggcgaatcggtcgccgcatctggtcccagcagcaccgctccggtcggcactgttccgctttctcgatcggcctcggcctcgtccccgaccggagcgtccgctgctggcagcgcggccggcgggtcaagctcggccgtgccgacggtcaagggcctattcgttgcgggcttcgtcggcggcacgctcgcagtcctgtatggcgttggagcaggtctctgagacggtcgtacaaactgcaggtcgcttgctggacgggcgacccctcgactgcttttgtattccgccttttttgcagcgacaccctcccttcccccagctcttgacgatggctttctctctctagtggcagcgaagagaaagagcgacgtcatgcgcgagcgacaaggagcgagggtggatagaaacagcggcaaggcgagtcgagaaggaggagaggtcgatcaggcagtcggcgcgttgggctgagtccgcgccttgcgctcgagaacggcgacgacgccacctccgacggcggcaaagaggacgagcaagccgagaatgaagacgagccggacgaccgcacgccggtagtcgcggcgggcagccatccaaggcgagggcgtcgtgagcatctcaaaggacggcgtgtcggcgtcggccgcaggctggtcgtccgacatctggcaagccaagaacaaagtggttagcgccttcggcatctcgacatgctagtcggcaaaagggctcacctccgagaggatgagctgcagcgtcgagtccttcggctgcagcttttcgaagatggaccatcgggcctcctcctcgtaggtctgaccgctcgggaggatgatccgcgggacgagaggcgagccgggagcagactcgcccataaaggtctggaaaacgggtagcgatgggcttggcagtgcgtcggaagaccggcggcttgcgctgagagcgcgtcgggcggccggcagaggatccgagaaccagcggacggtagtcgcggccgaagtagacattggccggtcgcccttgagcacgagccagcccgagccggtcatctgcgcggtctcgctcgtcaggctggtcgcccgacgccgtttgggtccggcagcacggagaggagacgcccaccaggccgtgtcgccgccgagcgggtgcttgaggactggcgccgagggactggaagccagcgatgccgggatcggcgcttgcgtcgttggtcgtccgcagcccgggagggatgtcgcacgctcacggtagacggcaggagccagaggcaggacggaggccgggccgagcgaggtgaccgaggtggcgtcgatcgacacaggcttgtcggtgggcgcgagcgagacttgggcggccgtcgagtcctggacgataacgaggtcttccaaagtaagcgagggccgggtggcttcaaagcaccaagggtccgagtggccgggcgacgatgggcgagatgactgttcgccgccagcctgtgtcgctggcgacgagtcatctagtgaggcggaggttgtagacctgcgagacgcaaaaccgtcagccggcgaatccgcgatagagaagccaggaagctccatgcaagacgcacttgagccggtgcgaagccgcgctcaccacttgaggccggccccaaccgagcgccttgtgctgcgtctcgacgtcgagactcgaagtctgctcggcaggggcctcgggagagggcgaagagctttccggctcgaggacaaacaaggcagcgtcgggctggtgctgctgctggagtgtcgtgttggccatcggcgttgctgggagggaggaggaaggctgttgcggccgacagggacgatgccgtcagcgtcgctcgggtgggaggctcgcgtgacgcgcgccttgctgaaggtccacgtacaggaagaaggggtggcaccaaagtcggatctggcggtgtggtagctgtaggcgaagagtgggggatagacaagggtgacggtgagcgagagctgccctcgagccaagtcggccgttgacatctgtcagagcggcccccggcgggcggaggcgcagcaggcaagtcgacccgtcgacccgtcgatcgagtcagcccgcaatcatcgaagcgccgctcgcccgtcctgcctgacaaactgccggctaagcttgcccccgcgctagcctgccaacgcaaacgctcgtccgcaagaacagagtcaggggctacaaggggcgtcgaggcgctctacacaggtcgcgctgctcttctcagggagggtctagatgcttgatgctggcgttgggtgttgcagattctaggagggaagagggcgtctaggtgggtgcggagtctctagatggcgaggagcgattcgaccttggcgccgccgtcgacgaccgacttgacgtcggcgaggacctcattgaacgaggtgaacatgcggtgcgggatgcgctcggtttgctgcaggaggccattaggtcagtggcccgtcgagagcggagtatcttgaggcggacgcacgcagtacgccttaaggtcgttctcgcctcccttgtccttgacgaacaggcagtccgagtgccgggcggcactcaggtctgtcatcagggcagggacgtcctcctgtcagtccatcgtcgctcgcgaaggggaagtaaagggatttaaaggaaaaaaaaaggttatgcacctgagacgccgtcgcccatgaaaaaggttgtcggccgcgggttgagcgccgtgtaggggaggatcgagagcgacttatcgtggccgaacggcctggttgatgcagcggggtcattagtcgtggtacacgccctaggcagcactctggggcgcacgcacgagtcgggattgcggaaaacgatctcccaggtctcgccggtgccagcggcgtcggtgaagcggacgtcgttggcaatgatctcgatcaggcgagcgtcctcctcgccgatgaggacgccgagcattgctcggatcaggggcgccatgccgctcgaaacgatgatgaccgggatgtcgcgctccttgcagtaagcgtggaacgccttgaagcccgggtcgagcgtgatgttctcgcagaggacgcgcgtgcactccgcgaacgagagtgtgacactctcgagcatcaggcggaagctgtcgcggaaacagatcttgtcgtggaggacgtcgaggttcatctgccgcctgcagggggccagggggtcggaggaagaggagaacgccagaccggtgagcgccaaagcgacaaagcggctgaaacaagaaggacgcaccgcttctcgatgccgaatccgtagtctatgcgggcagacgaggaggaaggagcgagttgcggggtcagcgagacgttgtctgcgcaatgcttcggcccgttcaacaggaagcaggcgacgacgcactgtcggtgagaaagtcgttcgagtcccgcatgctgatcgttccatcgtaatcagactgcaaaaggcagaccagtgggtcagccttgtatctgaagggtccacgggcagtcaggctcaccaggacgacgctgtgaaaggggtcccgaaaggaagggagcgagctgcagcgtcagctcgcggagccggccgtctcacaaaggtcaagcagccagacgtacaagggcttgccctcctgaatgggcgggtagggaaggtcgttggacatggcgtttctaagaatcagaagacaagaagaaaagagagagaggggtgacggttaacagggcacgttcggagggacggctcaactgggctggaggaagcgcccggccaagcccgtcatctagccggacgatcgacccggtgtcagccttcgtccgacgaatgaccacgaccgatctagccttcggacgaccgggtggctagagggcttgtcagcaacgtatgagggttgtcctgcaagcccttgcccgctagtcggtcgtcagtgcgagaggcgacgggcgcggagcggaggctgcggtcccgggcgctgactccgctgactgctgactggcctgtgagcgagggtcagcccaacctcggtgaggataccgtcagaggagaatagcctggaggcagaggtcttgtcagagtgcgtcgagcgttaagcagcttgacgttgcagggccagccgggggggagggctcgctgctgaccccgtcttgccctctgacgtccaaccctgcgaccactctcgacctccttcaacccctcaaagcggacccggcaacaatcagctaaatggtctgtgacctgatctcctccctagttcatagccctgacctgatccaccacttgtcccgccagtccaagcgcgccggcgtctccgcggccgagaagcgtacgcgcatgctcgccctcctgcacgagacgcaagacttctttatcctcaaggagctggaaaagctcgcggctaagtcgaagggcattgtatcgcagagtgtcaaagaggtcctccaggagctcaaggacgaccggctgattgagtgcgagaagatcgggacgagcatctattactgggcgttcccggcgactgctgccgtcggcaaggagtcggcgctcgcggccaaaaaggccgagctcaccaccctcgaggcgacggagaagcagctcggggcagacgtccaggcggcgctcgtcgggcgggagccgacggtgtgtgtcgcctaggttgcggtcacctggcgcggcgcatacacccgtcttgcctccgctgcccctgaccgccgtcacgtcattcataccttaggtcgaccgcgccgccttgctcgctcagcatgcaactctacagcagcaggatgccgcgctcgacgccgagctcgcctcgtacggcctcgctgacccggccgcgcatgaggtcaagctgcgcgccgtcgagaccgcccgggccgaagcgtgcaagtggaccggtccggcctccagagcttcactgattttgctggcggacgagctcaacactcctgcgtctgccgctttcgacagagaacacgctgctcgtcctccagtacgtcaaggcgcaagccggcctgacggatgccgagatcagagagcagttgggcatctgtaaatccgccttgcctcagactgactcgataaaaatcgttcgctaacccgaccgaggcgtcctttgtcagccgagacttgggaggaaggtgtgccttgtctgcttcacttcgctgtcgctcgacctgacttttcgctcctcccggcccgccgcgctcgtaggctactgctgaactcaacgaccgcgctcgctttgacggccggcggcttccctgacatatgccatgcgtcccttctatcgataaactagtggaatgtcgcggcctcaggcatctgctcccgccttgagccgggcaaagacgtgaaagtgcggcaggagcttgacgctctgcagcctcggcgggttcatgaaccacgccgtctcccactcgtcctcggtccagcgctcgcggacgaatgtcccaagctcaaatccgacctcgcctggccgaccctcgttggcgtcccctgatgatgtttgctcgccgtcggtcgacgaggaagcggcgccggtgaagccaaagacgccgatctcgttcagctcaggcgtcagctgcgaggctggcacaatagggagctgtgtccactgtcgacggccggaggaggagaaaggtcagccttaagatctgcccatggtccaatatgtcagaattggacgaacgacgaggaagtggtaaacgtcgtgcggcatcgagtacggccagtctggatggtgaggggtcccggttagcccctcgtcatctttcgcatcgtgtcaatcttgtacgagccatttgccgcaatgcagtagtctgaggcgggcgtatggctgtcgaaccgaggctcgtctacgctaggagctgccggcgcgtcgctcctcgacgatcctgctgatgttgctgctgcgggcgacgcgtcggctgcgtccggctgcttcgacgccgaaggaaagtgaagccgcttggtgaggatgtagcgttctgtgccacgagcgcgaagcgcagctgtaagcctgctactcggcagcttgcgatgagacgcgaggcgggctgaccggtcgagcctccgccgaattggtgcttgacctgctcggtccagatatcgtagcgccgttggaggtccgggtgccgcttgagcttgccgaggtccctgagggtcagagggtgctcagtcagacctcgcctctgcttgttctgccaaaacaggccggcctcaccccttgcggatgaagcgcttgagcgtcggccagtcaaacaaaacgtcgaatcctcggatgtcggcgagcgtcggcaggcccggaatgtcggccggcggcggaaagagcggcgggccgtgggtgatggagctcgcgtagggtcccgaggctgcagacgaggaggacatgctggctgagctgacaagatgatcggaggggctgaactcgagctcatcttgcagcagcagccgaacgccgcgacgcgtctgaatctgcctccgagatcccgaagcctcccggcgatgacgtcgagacctccctcgctctgtccctcaaccgccatcttgcccgcccctccccttctgccctcacacaaacctacagccatgtctcctgtaggttccgattggcgtgatagatcgatgagtaagccgtctgatgcgcagaatgctcccctcaccgcaggtctctgccatcaccgatgctgtcgtcaacattgtcgagtgcgccctcccttccctccccttcaggcctcgcctccagtcggctgaccgcatccacctttctcttgacactgccagggctgcctttagcgcgctctacgccgtcctcgacaccgtctaccacatcctctctttcggcctcaagtctgtctggacggttatctcgggtgcgtccttcggtgctggccggccctgctgcgttccagctcctccactctgtcttgacgaccccacccactgccctcgctcgcaggcatcctccgcacaactttcaacgtctccgagtcggccatcgagggcatctttaacacgattgtcggcctactcgagtttgtctgtacgtccctggcggctatccgttgcagccctttgcgtctccgtctcctgcgggacgcaacacagctgacgcagattcgacgatcactgctctcagggagcaacaagttgttcattggcctcgcgctcctcgttgccgtcatctacctcggccggacccagcccaaggtcgtcggctcgggccgcaaggtcaagcgcacttaggccgcgcgccgctctgctgcccgtcccaacaggttaagaggagggaggatgtgtgggatgtgtacctttgccgtgatctcgtttgccagtctgccctcgcgcccctccttgtatcttgatgcccgtctgtccgcctgtcgctcgccggccgaatgttcgcctgccggccgtccgcctggaaagctaacctatgcatacagtgccaaaccagtacaaccgtctacgcacgaaaagctgccgccctccgatgagatccgctctggagcccactcacccgtccccccttcacatcggcagaacgtcgacgtactgcggcccgaggtcctcgatccgagtgacgccgagcaggcgcatgcccagttcgacctcggcccggatcaggtcgaccgccttgacgacgccgtcagtcccgtaggccgactgggcaaagaggaaggtccggccgagcccgacggcagtcgctccgaggcagatcgccttgatgacgtcggttccccggcggatgccgcctgcggtcaagcgctgcgaggtcagcgacgagcacagacgcctttggccgagagctcgacgcaccatcgacaaagatttgagccttggatgaatcaagcaagtcgccgtgcatccgccggagctcctcgagcacgcggatcggaggcacgccgctgcagagtcgagcggtcagtcagtcgtcgcgcgcaaggtcggagaagcaggccgaaacgcaccctgaaagctgccggccgccatggtttgagaggacgacgccgtcgcagccggcctcgatcgcaaggacggcgtcctcaaccgagccgacgcccttgatgacgagcgtgcagccctcgccggcctgcttcttgatccagccgaggtcgtcccagctgagatccgggtcgacgaacgaaaacatcttttcagaggtcgagccgcccttggcctgcttggtgccaggcatcggcgggttctcctcgagcgaaacccgaaggtcagcctcccgccggccaccgaccggcgcgtcgaccgtcacccagatcgaatccatcttgtggtcgagcgcggcctggagcgcgccgtgggcgagctcgcgatttgaattgacgtagtactgccagaagaggggctggccgggcttgcggaccgaggcgagctcgtcgagcgaacacgaggcgttgctcgagatgcagtagatgatgtcggtctcgccggcgcccttgacgatgttcatctcgccatcttcgtggccgagccgggcgagtgccgccggcgaaacgtaaatcgggagcgaagtcgcgtggccgaggatcgtcgtctgcgtgtcaaccttggcgaccttccggaggacgcgcggcttcagcagaatccggtcataggacgaccggttggtgtcgagcgctgcaaggggaggtgccatcgtagcgacgtcaggtcgcactcggaccaaacacgcgagacgccagagactcactcttctcgtcatccgagccggacgagtagtctgcgagagagcatagaggtcagcggtttgacgagcaactgacgcggcgcccgcgctcagactcacacgcccaggctttcttcgcgagaatctcacggcagactctttcaaagtcgtcgaggttgatcatctcgtcgatatgcggcatgttctccctcgcctccttgatgcgccagtcctcgtcgctgagctcggcgtcggcttcgcctgcctcgagcgccggcacgcgaccgactttggagatgccggccggctggccctcctgctcctggagcgtgcctggcgggtggatcggcttgaagagccgggtgacgtccttgctggcgttggcgaggatgatctcgggcccgccgggatgccgctcaaggaactcctgcggtcagatgaggtgggctcgatggtcagaaggtccgacactcactggagagcgcagcgcaaggagcaccagcgccaccgtaggagggaggacgcaccgagacgtcccagacttcgtcgttgatgataacccaggtcggctcgtcctttcctcgggccttgatttcgtccctcgagaagagctgtagctcgccaccgccttgggcggaggacgacgcatccggacgcgccttgattgggtgcgcgccgccctctggcgggccggccgtgtgcttgccgccggcctcgtcgagcttcagcgtcgatcgcgacgcccagtaggcctgaagcgtcgagcagaggagagagcctcaacacctctatcgctactgggactctgcgaggcacgacgcacgagtggaagggcgatggcgaacgagccgacggtccaagccgatcgcgcgctggggcctgcgcggcctgcagcgccggcagaggtcgagtacggtcggagtcgcctagggagcgctagccgggcctgccggagggacgactgcatctaacagagagcacaagctaagcaggagggcggtcgtggtggtggtggtggtggtggtggtggtggtggtggaagagggcaaggccaggcggtgggcttagaagggcagttggctcggcccggcgcaatcgattgctccggcgcgcgaagaccggctgcagcctgcagggctcgcgagcctgtgcggccgtctgccgcaccagacaggcggagagcggtgcgatggacaagagaagcgtgaggagcatggagggctttgctttcgacagcgacccggccgtagggagacgaggaccatgtcatccacccctccccctctgcttcgccgactgatcagttgcgacgtgggccgccggcattgcccgtcgcccgccggcgctgggcatctggccggtcgccaccgcggtcggcggcgtccctgatcttgcgcatgctcttccagagcgggtcctgctcgtcgctgtaagcaatgacgtccgggtcgcgcttgttgtcaatcttggcctggaagcccccggccgggacgcgaaggttgttgcccggctgaaggccgccccgggcgacgatgccctcctccccggcccggccgagggcgccaaagatgagctcgagtgagcggttcgactcgcagttggccatgatcgggaacgtaacgatccgcggatcgacgtcggtgtcgacgatgcctgcgacagcacgacgggtcagcttcgatcggccgacaggagacgagcgcacaaacgcacccatcgtcgggacattcttcaggttgcactcctggatgacgttgatcatctggcgcgggtcggcaacgacgacgaggtcgggtaagtagctcccgttgaggacatactcggcaccaaagctgccagtcaccaaacgggggaaagggtcagtcgatcggttcaaggcttgctgcctgatgcatacactcacaccgaggccgcatttgtgagcgatccaggccgccagcgctcggtgacggcatggccgacgccgggcatccgagtgacagccttccagacagggctcttggtcacgtgccggcggcccatgaagacgatgacgccgtcgtcgcggctgatgtcgcggacgacgccgcacgccttgcggagcgagggcagcgtgtgcgagaggttgatgatgtcgacgccgccgcgccggccggcgaggtaagggtggtaggccgacagcgtcaggttcgggtggtggccaaggtgggcaccggcggccatcaaatgcgagacggtcacgtcgtgcgctgaaggaggcttcgtattggccgtcgtgggcttccctgcggacggggtgaggaggcagagggagtcagctcagaggctagcggccatcggggtcgacagtcgatctcgagtagaagtcgtaggtacagttcgagtccgtctggtacgagccctcctcctttatcgagtcgtctgagagaaggaaaagggagcgagggtcagtcgtccgaccagcactgacggcagcaagaactcgctcgagccgagctcaaagcaggacgcctcctcctccgagctcgcggcgaccaagctcacaggactcacatatctgcttcctggcctgcttctgcttccagacctcctgccaagtgctgcggcgcctaggccgagcggcctcggacgacgagctcgcctcggcctcctgggcgagcatgtcctcgccgctagcagccacctggcccgtttgctgggcatcgggcgcccgcttaacctcggcctgggtcgcgcttgtcgcctggctcgagctcgtgatgggctcctggatcggaaggccttccagctgctgttgccgcggaagactcgaggcgaccgagcgagcggctgggcgacgggtcggacggagagaagggacgggtggtgagcccagggaggctcacggcggccagataatcagatcgaggcgacctaccagcaactgagacagtccgcgagacccggagcggcgtcgagagagcccacatgctgggagaagattgaggcgggaggggttcgtggtagctgcagcagagggccgggcagccaggctctgccaaaagaggccgccttcgcagctcgcgccgccgcatccgaacaggcggggccagctagcgagccaacgacgacaacccgccagactcccctctccgctttgctcccaaggccgcatggcctgcgcgccctcccatctgtcgtagttgcaccttctctccgcagaaccgccatcgtttgtctcgagacgggctcggatcgcagctcgaccggaggccggcctttgtcgcggccgccgcgcgccctccgctcctcctcggcgagccatcacaggcgacctcctctctccggcgctcgtcgcctcgctcgtacctggctcgtcaggtgcgtgccgttcttgatcgcttgcatttcggccgctgtggtgagacggaaggactcgccgacggagggccggggagggacacgtgctcgactgccgaggctagcgcgagctgtcccggtcgccccccccctcctcgtgctgctcgcgcgagacgcttacagctaccctgagcttgctgctccatctgagctggctggatctttcctgcgagggttggtgaaccgggcggcggtggcgaggcgctgggcgtttccaagcggcgagcagtggagtagtgacgcaaggctgcgagccgtctgggaccctcgactgacgagtactgacgaccctggtcatccgctattctttcaggacccgctcccggaccttcgctcggcgcctcgggggcgacgcttacacgcctgtacttctgtgaccccccgctcgtcgttggatggcccggccagcctcgctcgcccacatgcagccgacccactatcgtcctcatccgtccgcaccgccgccgccaggtcaagcccctccgacccagccgccgccacactaccctccttcttatgtcacgggcgttcgcacgcctaggcaaccagggccgccgcccggtcatcctgctcgggcctacggtcctccgccgccaggctaccatcagtcgccaggcgctccgggcggccctccggtcatggttcggccgccgccgggtgcaccgccgcctcatccaggcgttcctggcgcgcacatgacgtccgagcgcgaagcacagcagcagtacatggtcgcctcgctcaggtcggccggcgcgccggtcctcggcaacgccctcgtcgcaggtgggccgccgcatgcgggcacctactacgcacgaccgccgggccccggaccagttgggcagggcaggccaggcatggtcgggccgggcggtcggatgatgcacccaggcgttcctcctcaacagcagcagcagcagcagcagccgtcgccaggcatgcacgcctacggcccagctcagcccggtctgacggtgcaggctggcggcggtcccgcttctcagcactatcagcagtacatgcaccattcgcatccgtcgcacgctccgccgcacgcgccgcctcccccgccacctccagcgatcacgacgtcgtcgccgcatccgccctctcgccctgttcaggatccacagcacggcccgccgtcgcatccgggctcgtacgcaccacagacgtaccagacggcgccttcaccgtcgagcacgccccagctcatccatccaaacgcagctcagtcgccgttgagggcacccgacccgccggtccgcgtcatcaacggcaacctctcggtgcacgacccgcaaggtcggctgagggttgtgagctcgcctgtccagcagaggccagcgacccagcagacacaagcgccgccgcagccgtcaccccaacaccatcaccctcatcatcctcaagcgccgccgctccaacccgctgcgtctcccgcaccttcgcgaggtatgcatcctccgccgcagatgatccctcggccgatcggacccccgatgctgtaaggtcatgactcgaagccgtgtgcttggctctggcctttgctgaccgcccaatctgcctgccgacagggccaagacggagccgccacacggctcggcgatcctcagactgctccaattcttcgccggcctggcagacggcgagacggtacgtcgttgacagcgtgtcgctatctctcgcacactcgctgacctcccgctacgctttgtcgcttccagaggagcgacctcaactattggcagaaccatgtccacacctactacaccgagacgggctcgctcatgtacgcgctcaagtcgtccgaggacgctagcaagcgcttctttggtcagttgctcgtgctgtgctcgaaaaacgagctctttctctgacgcgaacgaaccgacattcgctgcagagctcgcgtgctcgtctctaccgcgctactttctcacgagctaccagtgcggcctgcgatcgatcgccctcaaccttgaaaacccgcgcgagtctcgggcgccctactcggcccatcagggcaatcggacgatcacggtcgacgtctcgcgggcctcgatgacaaacatctacacgaacgacacccaggtcgtctttcgcggcgcgctcaagtgcgtcatgatctttacgccgaacgaggcgccggaaggcggcggcccgccctcgggcggcggctcgctcctcatcgaccggatggaattcaacacggtctcgttcgtcgagtttatcgcccgggcctcggtcaagcgccagccgatctatcgtgttgctgagtcggccgagtgcagcacaagctcgtcactcggcaacactggcgacggcgctggcggcaggaatgggagcggcggcgcaaagacggcctcgacaccggctggtcaggcaccgacgcccggcatgacgccgagctcgaccgcctcggctttgccctcggccaaggcggcggccgacaagggcaagggtcgcgagctggccatctccgaggtcgatgaggacggccttagccttggcgatgacctcgacggcggtgtcgggccagttggagcaccagcgcggtcaggggcaggccgcgaggccgtcgacgtcggcgagggcagctcgcggatcgacgacgacttggcatcgacgacagccggcaagcccgcgaatccgccgccgccgctcgaagttatcggcgaaacggtgacgatgccggatcaagtcatcaacgcctacggcatctcggacggtgccctgcgctgcctcgaggtgagtctgccggctgacctggcttcgacaagtgggccgcactggctgatcggattcgcccgctctttgccctcgcagatcgctcagacggtcggacagatgggtccgctgatggccttttgccagacccaaggcgtcgcgcccagaggtgcgtcgcctcttgcgaatctcggagcccatcgttcgtgcgctgatcaggccctctccctcccgacagacggcctccatcgcttcgccgaccgctaccggaaccggaccgtctcggcaccgagcggcggttccggcgcaacccagtcgctgacgcctgcttcacatcttcaaggcagccagagctcgcctctgccgtctggcgcggcccgaggctacgtcggtgagcaccaatacgacgcggacggcttcgagcacgagcactatgcggcggcctcgaactcgaaagccgggcctggccagggcgagccgagcaaggcgcctgtggcacggggcacgctcaagcgcaaaaagtcgaacacggccgacgactcgagccgcgagtcgacaacgccggacggccaccggcccgagggagggccgatgacgaggcgaaggagtcgcatcacgctgaacggcgacctgccgtcgtgattgcaggagggaagggtgaaacgagctgttttgacgacccgggacgcatgacctgttacttgctttgcccgctgtcagtctgcctgccagctcgaggtcgttctcgagcgttctggcgcacgtcgctcgcgtcgcgttctgtcgtcgagctgcgcgcgggggttgtggtggcggcggggcggccaccgctttcgcctccggctgtcaaaagcagcttcagccctggcgaaccccttctgcttctccaccatggaccaatcttccctcacggggagttcaacgtcgacacgagcgaagcacctcctaacccctataggtgtccatttccggtcgagtggcttccggcggcggagaacctagacgaccaccttcctcacccgacgcctgcggccgcctgcctggagaccgcccttccgggggtgtcgacttcggacggttgcgcgccttggccgacggcggatgggctccttatttcatagcgtcctctcttgccccctggggtgtgggagtcgggcaacaccaaggagcgtagaaacccacatcctcttcctcttctcctacgccgctgcgagccgacaagtcttcattgaaggtgtgtcggcctcccgggttggacctgcctctcctccgtcgaatctcgactcggccacgacgctcgctccgctctcaggacggtcaacagagccggcccagctcggagctcggtcacgtgggatcagctcgacctcggcgtcagaagctcgtgttggcccaacctctgcacctcggtgcccattgtcgctcagctcgactggaatcctcgttcggcatgtgtggcctgtgccttcctacttgctcgctcgcgatcgccgctccgtcgtccctggatggtcagcattgctgctgaccggagagagcgttctattcaagcgcgcgtcaataccctcctcgaccccgaaaccgccctctgcgctctacatggccaaggtgctcctggtcaagtcggtttcggcaactcgcgtcatgaaggggatcgtcaagggagaggaagaagggcggctcgggacataaagggtggcggagagggctacaaggggggtcggggtcggtcgtgtgtgtgtggtcgggtggtagggtaaagaagcgagcgcgaggcgaacaacagggcggtggcggtaaagaggagaaacaagcgaagggggcgcgcccaggtgggcgacgccgggcggggcgagcagcagagaaactggggacgaggcctacatgaggtgaggtgaaggaaggggaggaaggaacggaccgtgtttgaaagcgggcagagttctagctcggaacagagagatgggcaacccccgggtggtgcgtgtggttggggggcggctatgcaaagtaaagggagagtgaggaggatggtcggccgggtcaggggccaaagaggccctggtagaggagagccgtgctcttctcgtagttggtcggctggagagggcgcgaggctagcgtcagcgactcggtcaccccggtagcggccgagagacgccgcgcaccaggtggtcgttgagcatcgactttgagaaggtgagctcgccaaagcgccggggcacgtcgtcgaccgcacggaggacgacgcggtgggcctccttctgcgacgtcttctcgccgccgtccggtcgcggcgagccgctgggcgagtcgtcgggcgtgccggtcaggtagacctcccagtgctcctgcaaaagaaaagaggaaaagagaaggagtcaaggggctggtatccgcaacgagggtttcgggccggagcgcaccatgttgtagaccgtgccgggcgggtagagcttctccgagtccatgtcggcgcggagtgtcttgtagagtgagaagagctgcggttgacgcgaagcggacaaggggaggcgcattggagtcagcttgccgagcgcgagtccagccggcctgaaacgcacccagtcgtcgagctcctgctgctcgctcgggacctcgacctcgggcgaagtctcgcgcgcggggtcgcggtagtgccggtctcgcgcatagttgcgcgagtggccacgctcgagctcttcggcgctcaggtggatctcgggcagcggaccgtcgggctcgccagctgggcccggctggagcagcgcggggccgtatttgatgcggagccggcgctggtggaggccgacgacacggccgacaatttcctcggtgacgctgctctcgtcgctgagcgtgacggcgatgttcttgaagtcgcgcaggacgccgaggctgagggtcggaacgatgtcgttgttctggacgaccgagctgatgagacccttggcgtggctcgccagatcggccgaagcgaccgaagggcagccgtacgtgtagcagtggatcggccggccggaaggcaggcccgaggagaagttggtgacgaacggcgtccgctggccgaccgtcgacggcgtgaggcccgggagcgaagcggcgtgctcgtcaaagtaggctgtcgggcagctccagaggatcgagaggagggcggcggcgccgccgccgaggctgtggcccgtcaggacgaggccgtacgtcggccagtcctcgagcgctttgcggatgctgtgacgaaagcacaggaggggagagttaggagatgagcgggtgatgaggcggcgggcggacggacgtctcgtggatggtgctcgagctgctcatgagcttgcgggcagactgcgggaccggcggcgtcagagcaagcgcacgagacgctggtggctgggagtgacgcacgaagagcatgcccgagtgcgcgagataggtctgactggggtcgccaccttcgacctcgagctgctcgtactcgcagcagaggtcgacgagcacgtcagagaggccactgcaagggggagctcacaagcaggtcagcggcagattagaggaggtcgactcccgagaatacgtacagcgtgccgcggcaggtgctgtaatcagcaggagggagggtcagcaatcgtcgagggcctctactcgagcgcggccactcacaggacgacggccttggcggcatggtcgacggcaatgtagtggacgagcgggttgagcttctcgttcgagatggcagggcccgggtcgacgtaggatgagagcagcatacactcgatcggcaggttggtgtgctgcgcaaacgcccacgtgttgggatggtagcgaccgcccgaggggaacataaagtcggtcgagccgaggccgaggacgcgcaagaaattctggccgtaggcggccgagctgaagcggcagaacttgtggatgtttttgacgagatggtcagccggaaagagggcctggggtgaggcctcattcgacggcggagccttggcgctcgagtgatactgtgaatggctctcagtcgtgcgcgtcgaggtgaccgactcgtgccggtgccggcgggcgccggcggacgacaaggcgactagcggagggcgggcttggtgcttcgagggggcctttgcggggaacggcatcgccggctgcttgagaccgttacccgccgctctccttgtcggcgaacgaggggcgtcgcgtgagggcgagcggctgtgcatggcagcttcgaccgacggtaggtctgcgccgtcgaccgaggtggacgcctctgcgcgagtcgtagcgcggggctgaaagccggcctttgcacggacgagcgcacgcgagagggcgccgatcgacggcgtcggtgtcgaggatgacgaggtcgagctcgacgacagctggcgcttggtcttgcggggcgtcacggccggcgacagcgcgagcgacggttgcgaagccggtgacggcaggacgggcgacgacaacaaggaggccgagcccatcggctcgtcggccagatcagggtagagctgctcgcccgtcgggccaaaaatggcagacggcgtgaccggcgtgcagctctcgctcgacgggctgccgacgagatcctcgacctccttgagctcctcggtagccacaaactccggtggaccgcggaccgcctgccagtcgacgtccatcagactcgcgaccgcctccgatcggccgccctgccggaccgtgttgcgcgggacgggtggcggcgagccaggcgagtggccgcgcacgcgcttgaccgttcgcttcttctgcagcagtcgccgcgtgatggtcttgaggatgacctggacccgggctgacgactcttgcgggtggtcgagcgcctcgtcgtacgctctgctggcgaccgtcgtcgtcgtcgtcgccggagcgggcggagagtggtggccgttcggagacgaagacattgcgacgagccggacccgcgttgtcgccaacatgctttcattgcccgcgtcattgtcgccgtttgaaggagtcgaggctaagccctgctcgacctcgatccattcgtcgtcctcggcgaggatcggtgccaccggcggcgccttgagccgcgagccactgggctgccggagtcgttggaagtcggccgcttggtagtgctcgaccgtctgcgtctcggtcacctgctccgtcacctgctcggtaatctcgtagtaggcctcctgctcgccgccgcgccaccgctgctgtaagcgcccgccgtcgctctcctcgacatactcctcggggtcttcgccgacgagatgttcgagctgccggacgagcgcttcgtcatcgtccgagctggatgactggacgtcgcgtcccagatcggactctgcggcgtcatccgctgccgacgagtgctgctgttgctgctgctgctgttgctgcagagcggaccggacgtcggtcaagagaaagctcgagtcgtcccgcgtgtacgtcggcgagcgaggcccaccgtcccacgagtagacgctcgccggcccttccgagggcgggcctgctgctgaagtcggccggttgtcgacgtcgatccggccgctcgagtcctcgttgagctggccgacgacggtgcagtcaaagaggctggttcgttgcgcacacgtcgagatcagcatacagcgcgacaggaagagctgactgtcagacgcacactttcggctgcttcgtgtcagtgaaacgcttgcgcgtcgcgagctggaggcaggcgtaagctgtcagggccttggtgagcgccgtcagactccggacggtccccatcttgcgctcggcgagccgcttgtcgtgcatgacctcggtccggatgagtgtgatgatgctcgctggaagccaagcgatcataagtcagcgacaggtccaaccgagcaccgacgcaactgactcacacagcgcccgcgagctctcgtttgatccgaaaatgccgtcaaagagcgagaccgactcctgggcggccgagatgccggtctggacggcggtcgaggtcaggtagaagccagacatctggcgggcgggcgaggtatgctgaggtcagcttggatgcgccggcatagcatgcggccgagggcgccgagaaaacgacctgaactcaccgcaaagagctcggcgagcgtgaaggtgtgcgtgatgaggtagacgccgaggtttgtgtactgcgaggagggaggatggggtcagccgagcgaccgtccaccgacgccagggcttacccgaggacggaccttgtcgagcacgctgagaaagacatcgttgccacctttgaggctgccaagcttgtcaccggcccagtccatgccctcgcggacggcgtagacggtccgagcgcttgagacggccgcaatcagcgcgcgccgggtgaggccgaggccggcggccgtcccgtacttgcaggactcgaggatggcctcgacgaagaaggcggtcgcccggagcgagacgcgcatcgagagcgcgagggccgagatcaggttggcgaggtgcggcggcaacagcgtcggcccgaccgagagcgcggtcgagatcagctgaagcggcaggcccttgaggccggcagttgccgcgctcggcgggagcgaccgcgggaggttgccgagcgagccgccgccggctgcagccaggcagggcccgctactgatgctgctgctgctgctagagctgatctcctttgtccggccgaccggagctgctggtggtgggctcggtgtggattcggatggacgggagcggtaggaggaggaaggcgggtcgtcgtcgtcgtcctcgcgctgctgctgttgctggctcgaggccgagtccttcgccggcccagcctcgccagacgacgagatgaggccggtggcgagccgcccgagcgagaacattggaaggtcgggctgctgctcgcgctgcgggtcgtggcggtggtgaaggtgcggacggaggatgacgacgtcagtgcgctgctgctgctgcccgtctcgacgcgacctgcgtcggcggccgcggaaggaggagccgggagaaccgacgcaccggttccccttcgaagcctgttgcgcgtcctgtcgcgagcaggtcctcctgcgcaaccgagtcgagcgtagagagggcgtgttctagagggagagctgtcgtcgtcaggatgacagaagtgaggggaagagggtcggcagggggggcgccgcctctagactgcgcgacgacaggacgtcgggctggagtgtcgagcgagggccgcacctgctgagagctcgggatcttcaaacgggcaattcggtacgcaggcaggcaacagaagcgaaggcttgcggagagatagactgcgaaggctcgcgtcgcggggtgaaggtgggcgacagggaagcgacgacgggcgctgcatggcctcgacgagcaacagcggcgactcaggaaacgctaattgcatcggcgcgtgccagagatgatcgtccctcaacgacagggaacaattgtcgaccagaaccagtgcagccgcatggcagcagcaggacagggacgcaggaacgcagggcagcgctgtcagtcgaagaagagtggacagcgccccctttctcgcgctgacggccgctcgacattccctccctgcgatgactgactggcagaaggatcatccgatggcattcagagagcggcctcctcctcgggccagcccttgcccccgatggcacctccgagcttgtagcccgagatcttctcccactcgaccttctgccgcgtcaccggcagcgcccgtcgaagcctgtgcgagcgttcaagcgtgtcagccgtctccagagcgcgacggctgaaagggcggatggaagacgcacgaccggaaagccttgtcgccgagctgctcgagccgctcgttgatgccctcctgcgcggcacgctcgagcttgctgacctcgtcgagaacggcctgtgcctgcttctcgcctgccggcgggagcgggaacgacggcgtgtcgaccgtgtgcagttggacctgtgcgcgagagtcacgacgagatcagcagaaacacctcgactgagctagaggaaggctcgactgacgttgccctgctcgtagtagtggacgacggcctcgatccggccctggacactgtcagaggcgaggtcgatcgcatacgacgagcgccagctgccgctcctattgcgagtagacgatgagcaattcggtcagttgcaaacgtcctccagcagggcccagaagggagcaaggtacgtaccagaagtttgtcggcgaataacggtggccggagaggacaagcgtgtacttgccctcgtccgcctcgacaggcgctgcagccgtaggcacagctgcaggcagcgcttcgtcctccaccgggacggggatgggcgcggcggcgacctctgaggcagtcgtctcctcctttacgccctccatcggctcggcgtcgtctgctgccgagtcggcctcagacagcgtctccttcaggtttggcgtcttggctggcggctcgtctgacgccgtaaccgacggcacgacgtctgtcgcagcggccgcaccatcgcctgtcagcgcaagcacgctgtcgtccttctcgacgagcgtgagctcagcctcgacctccttggcgacagcggcgacctcctcggccgtctcgacgagcgccgtctcgaccgctttatcctcgacttcgcttgaggtcgcagcagggtcggctgcggaaatgtcgtcagccttgacgtcctcctccatcggctcgtcggtctctgcgtctgccgctgcaggcggctcaatcgtcatctcggccgctgcagtagactcgtcgccctcgccagacgacgccccagtgaccggtgctgtggccaattcagccgctgattcctgtacgactggtgctgacggaggagtgccgagcttgaggtgcgggaagatggcgccggcaccggcggtaaagtagttggcgacataggcgtcgagcggcttggcgaacgacgcgctgcgaggggggaaaggtgagcgtcagcggtgtcggacgagattcaagcgctagacaactgacaggaatgaagtcttctcggccgagagctcgagcggttcgagctccgttgccgtctgcggtcgacatggagtacaggggagcgtcaggggtgcttcgagcgagatggggatgcaggcggacgaacgagggagatgtggtcgagcttgtacgactgcccgctacgcgggtcaaagtagcgggtcggctcatcagcactggcagtgggaagctgtccgacgtcggcgaggaccgccttatcgagagagaggggatgggggggcagtcagtcggctgctgctgttgctgcgctgatgaggtgcgagccgagcgcggcagagagccgcaccttgtgcgactggccagggagctcgacgacagtgttctgctgcctgtggtactttggcaaggcttcctggaggacctgctcaaacgccgcctggtcgttcaggatgagctttgcgtctgcgacgggggcgatgggacggtcagcgggggcgggtcgcaagccggcaagcagcagctctggcgacgcgcaccgttgacgacctctttgatctcgcccggcggcgcctggaggacgagctttgatacgcgcgcgatgcgctcggcctgaggcatatcatcgacaaagttggcgtcagacatttagaggtgtaacgggcgggaggggagcgagcagaaggcggaggcaagatgggtgtcgagaggggcttcgtcgaggacaccatctccgcccgcgaagccgctcagccctggccgctgaccgccaacatcagccagaacgccacgagccccatctcgaccttctctgtcctttttgagccatggccaacgtagagcggtggtgcgtgcagagctggggtcgtccaggattcttgctgagccaagctgacgggccgtcgcatcctctgccgtcgtccgacccccctacgacgctgcgctggcaatcgtcccgcaggatccaggacatcccgcccatcacccggtgcgttctcggtccatcgaggtctccctcagactgcatgtactggctcacctgcatcttcgtcttgcttgccagcctttgggtcgcggcatccgtcctgacgagcgttgccgtcgtgcgtcctcgggctggctcacgctcgccatttgctccgaggggtgcaggagctgacccgaccgcacccttgccactctctttcagcaatgccggatgctggccgaggtccagctctggttctcgtggaagacggcttttggcaactggcaggtttgttggaccagcttactcctcgattgtcgccccgaggctgactgcgcgcgagccctacccttgctcccaggtctggcgggccttgaccaactttctctactttggcccgatgtcggtcgagctcgtcctccatctcttcttcatgtgagtggctgtcgctgcttgctgcttcgacccgctcagagtgaggcctgacccgatgagagcgtcccgccagaatgcgctactcgcgccagcttgaggagagctcgtacgccggccggaaggccgactatgcctggctcctcttctgctgctcatgcatgttgctcgtacgtcctggcgctactgccgacgctgatgaaagagtcccggctgaccgtgtgcccgctttcaatgcggatcatctgctcgagccagctcatctcgcccttgtttactaagcccttcctctctgcacctctttcgttcgcgctcgtctacatttggtcgcgccggaatccgtcggtccgcatgtcgctgatgggcgtcgtaacgtgagtgaccccgcatccgctagtagcgactctgcacctccagcctgaccctcccgcgacgctttctcggctcttgtcgtccaacgacgcacagtgtgacggcgccctatatgcctctctgcttcatcgccttcagctggttcatgtacgggggctgggagcacgctatcagcgacgtcgtgcgtgcccctcaacctccgcactccttccgcccgccttgagaactgacaagcctcccctcaatctggcagctcggctgcatcgtcggccacctcttttggttcgggcaggacgtctggccgctcgagctcgccagcggcggcaagggctggtttgacacgccccggctcgtccgccggctgatcgacggcccacaggcagcggccgagcccgatacatgagcgtctggtgcggctcgagggcaagtgagaatagggcagccagcggctggcagggttgaggcagaaagggtaggacgctggagtcgacgaggcggccaggccagtcgggtttgttgggaggccgccctcagccgtggcaacggacgacgtttgtaggacagccgactcatcatcaccagcgtgagagctcggcgccctcagcactccaaccctcactgctcaggtagcccacagacgagcgtcgacgtgcgatcgaggggcgagcagcggttatgcagggcggcgccggcccggggcgaggtgctgcgcgcatcaaaggggctgctcgcccgcctttcatttcagctgtcgaacccttgttcagctcggcctccctcaacagccactatctccaactggaaggcagatcgcataccgtggcgctgagtggacgagcgttcggtaagttctgcatgaagaaccgacccttctagcgtgcgacgatcgcaagcctcgtcgccggcgggggtgtcgtcacgaacccccgcagcccaccgagcgacgctctgacatgctccagtcgtccttctctgccctcgcctctctcccccaacggccacctcgcgctcccacccgccacctactcttcctcgcacgacctccctctcctaccgctctcacgcccctcgcaaaaagagacaagccgtcaaccgctcaagcatgaccaccgccgccggaggtgcccgctcgaacccccatctcgtgcgtcccggcgctgccctcccagttgcagctcgtctgcgctatcacggcagagagagctcgcccgctctggcatccaccttcgctccacctcatctcgaccggcacgagctcattgagctgacgcccgccttgctgtgccgcccaaccccctcagcaccagccgctgctgtacgtctcgcggctgccggtccagacgaccgacaacgagctcgccgagctcctgcgcgagtgcctgccggtccgtctcggcctcaagcgggacgaggtcggccctgacagcctcgtcgaaggtccgtaacctttcgtctccgtcgtcttcctcctctcagcaactcggagtagctcgctgacacgactccctccgcacccttctcaacaaggaacgatcgagtttcgcgagttcgcaaagggtcagtgcgccctcccttgacggcctcggccgtcctgctcgctctacaagcatttggcgacggctgctgaccggccatcgtctttatgcctcgggctcgcagccgacaaggcactcgcaacgctctcgcacatcctttgtatctcgccctacccgccgccgtttgcgcctctcccgcactctgtcgactcgctgccgcggatcgcgagtggctttgctgagggtacgaccgccggcgacgtctgggaggcgctccggccggttagcctgcgcgagatccggccgctgcagaggcagggttcgtccttgcgaccttcgttgcttacggcctcaaagactgactctgcttcccgccgactctctcagattggtcgtcttcaacagactggctggttgagttttggtacgaggacgacgcccgccggttcgaggagcatccgccgcagctgccgtcaggccatccgctggcgatcatcccctacaacgctcgtcgctatggcgtctcgattgccccggtcagcatccctcctagcgcacggccgcagccaaccgtctttacgcctgcccactcacgctcgccctcggccatctacaccggccagccgctctcgcccttgtcggccggcgcgccatcgttcgtccccggctcggcctcggcccgcagctcgccgcagaagggcatggcggccggcctctggtctccctcgagcgcaggctcgctcgacctcgctgccgtcaccggcgcctacaaccctggcctcggcctcggtcttggcccgtttggcagcccgaccggcctcggcatcagcacgtttggccctggccaacaggtccagccggcgccagtcgtcggacccggctccacgagcgcaagcggcctaattgacccctgcaaccttttctgcaaggcaagtcagctcgtctggccgacactagtcgctgcaggcgctgatgcctgtcgacgattgcgaccgcagaacctcgacccgagcatcagctcgcaggatctctttaacgccttccgccaatttggtcagattgtcaggtaagacctggtggcctgcaagcctcccgcacctcacctcctgaccatttttccttctctccaaagcgcccgcgtgatgaaggacgacatgggcgccagcaagggctttggctttgtcagcttccagaggccgcaggagggtgcgacattcagtttctccgcaccccgataggctcactgactaaccagtcgctcgctacccgattgcagctcaccgggcgatgatcgccatgcacggtgcggcttgctcgcttgttcgctgtccggagaggcccgaccgtgctgatccccttgcgacctcccaggcgcgctgctcggcgacaagcagatcaccgtccgcctgcacgagcccaagaagttccgggccgagaagctggccgagcagcgggcaaaggcactcgctgggagcggagcctcgagccgcggtccgatgagcccaatctcgcagtacggcgagctgccagaggccgcgcattacaacgatgtctacgaccagcggccgaccgtcggtccgagccacatggtgacggtacgcagcggccggctgaatttcctcgtctcagccgtcgctgaaaatcgcccgctgcctgtgctcatcagccacccgactcgtcgccccgcatgctcgacgtcgacgacctcgctctcctcacgcccgaccaccggcgtcggatcctctcggccgagacgcaccgccgcgtcagcagcatgctttcggtcccgcgaggcgacgttgacacggtcgtccaggcgctcgttggtctcgacctcgggctcgtccaggtgctcaagaacgatgacctcctgggcgagaaggtgcgtcgacccgtgagaaactagtgcagctccgagatgcgtacggctcgctgacgtaatcggccacaggtccacgacgcgctcgcgctgctgatatcgagcggagggcatgtcctgcccgagcagcagccgtcgacgacgccatccgacacctcgcggccggcctctccgggcaccgagcgcgagcgcctgacgcgggcggttgccgagatcgagcccaacggccggctggcgtccgagatcctcgagctgattctctcgctcggcaagaaagagcgcgcgctctgcctcttcaacgccgactttcttcacagcaaggtcgccgaggccaaagaagtcctcgctcttcaggatgaggacgagtcgacgccgccgacggcacgcgcagtggtcaagccgaagactgacggctttgcacgagaggctgcgattgcaacgcccccgcgcgctcactcggctccgatcgagcccggcaccccgctctcgccgcggtcggcggccaagaaggcctcgcagctcggtctcgtcacctcgtcaacgccagtctcgccagccggatcgtccgtcgtctcggacgccggcgtcggccccgacatccagtcgcttgaggcagccgcggccgccatcgatcttgccgacgacacgccgtcgcccctcaagacggtcagcgaggtcgcagccctgagcgcaaaggacgcgcttgactacctgcgcgcgcacgagtcggcgctcggcaactcgtttggcgggccggtcgacgaggccaagtcgcgcgagatggccatctttctcgacgggttcgtccttgcgcgcatcgaaacgcccggtcggctgctgaccttcctttgaccctccatcaggctcgagggaaagccgccggcgcagcagaagcagagtctcggggagcggctcttcaagcagatccggtcgtggaagccgccgcgcagcatcaaggccgtgcgtgcccttcctttgatctatcccccgtcagacagtcaacgccgaccgatgcctcctctctctcgcagccctcagtcacgatccagctgctcgattcggaggacttacgggcgctcggcttcttgctgtcggactacccgctcgtcctgcgcgaaaaggtcgcgctcgccgccaacctcccgacctggccggccgacgctgcctgagtagagcccgaccgacgcatctctccgacacgactcgtcttgatctttctccgagctcctcttctccgaccctgccctgctttacgattgctctcacgcccctctctttccttagatgccgccccggtgccctcggtcgccggacggccgactctgctccgcctcacgacctctcctgtttctcccgattccccctcgcgcacgctcttacccccggcaccgacgtcggtgggggaggaggcggcgctgaggccggagggggaggtgaaggggcgcgccgaggcgcttcccagtcatcaatctcttgctgcgtcggcggcggcggacccaggttattgtagccagggccgccagagccgagacggccgccgccatgaaaatggccgcgaccgttcgagccttgaggcccgcggtcgtagctgcggttctggttgaagccggccggaccctgcggagaggagctgctagagacatcctgaaaattggtccggacgaagcctcgcgcaggcggtgcggatggcggaagtggtcggtcgggcgccatgacacccggcggcggcggcgtcggcagtggctcagacgccgttggagggctcggacgcggcagcgcgtctggcaggccaggccaacgcctgccccagcgctcaggcccaggctcggatgacacaatcgccgccccggcagatgatggcgaaggtgcaggtggctcagaggcggcggggaggtccggtttgggatcggtggcaaccgcaactggcgcagccggaggtggctcgaggacgactactggcggcggtggcgaaggcgacttgggcgactcggtcgatgcgggcgtcggtgccggtgacggaccgttcgatgacgggccggccacaggcgcagatgcaggcaacggcaggaggggcgttcggttgcccgcagacgactttgaagaggccgcccgagaaaagtcctcgacctcgccctcctcgacctcctcctcctcggcttcggcatccgcagggccgacctccttgtaagcctcgaaatcgggtccgtcgagcggcttcggccgtcgctggcaatggcaacattgtccgaaagtttagcgagggcatgatctgacgacgctaaaccttgacaagagacggacctgcgcccagacgccgaggcttcgccggaagttgcggtaccgcttggccttgatgtggttcgtctggaggaagccgtgcgagggctcgtcggggtcgatcagcagcattggccgcaggatccagcaaatgctttctgtggcagccgggccaaaggtcaaggcgcaggtcagcaccagaggcgttgcagctcgtcgcgacaaaggccgaacgcaccctccacggcctctcgcccgcgcgtctcatccggctgaaagtcaaagcacggcgcccactcgccgagcgtgtcgagcgtcgcctcgaacggtttattgccgcttgacagcatgctgacgacgacgacgtaggccgcacaggcgatgacggccggcggctggaggaccggcagcggcgactcaagcctgcgattcgcaccggccagaaacaagcatcagccgagtagtctgagagcgatcagaacggcggacgacgcaagggactagagggagaccgcacgcttggtcaattaggtcccagccgaggttctcgcagtgatgccaggcgtcgagacccttgcgccagcccttgctcgcttgccggcgccagccctgcgagaagctcgcgtacggcgtctcggccgcgaggtcgtacgtgacggtcgccgcgaggatctcctcgtggaagaggatggccgcctggaagcgctggaactccttctggctcgccgcctgcgggccgctaaagcgcgcgtcgtactcttcgcgccggtccttgtactcgcgctgaagcaggagccggacgaccgtctcgagccgggacgcccgctccgtgtccttgagagcgagaaagagcgcggcccaggcgacctcctgagatgcaccaaagcggctgctgtcagcacctgtgcccgagcgaagctgtagaatggaggagaggagcagaggccgcccgacgcacccgccagcccgcgtcccacatcgaggcccgcataaagaagcgatggatgtagatggccgcaacgccggctgcatgtcggacgctctcggtgttgcccttgcccttgaagtggatggccagcagcttggccgcgagattgacggcgttggcgagcgtcccgagctgggcaggcaggctcaaggggtgcgactcatgcgtcgccgacggcgtccggaggaggtcggacggctcaaagagccaggccgactggtccggattgaagccgctgctcatgacgcctggcgttggcgggcgagaggtgctggtggtctgctaggtcgtgctaccaggtccggctgtcgaaccgaaagagggagggagctgcgagggtgagggcaggcggccgagagctcgctgaggctgcccgtgcggtgcgaagatctgccgctgactacgtcaagcctcgatcgctttgagctggctgtaaccccggcgctagggagatgggggagcttaataagagtcggatgctgtcgtggtcgagggcgaggcgacgggcgacccaggggcgatgcccgtgggtcgggctttcgcacgccccaagttgggaaagaccccttaccgccggcgacctgacgggccatcacaagagtggccggcatcgagagagagcgcatacagttgaagcatggtggacgtgcgtgaggggctacagaagtttcagacaagagtgcgagagcaggcgagcggggggagggcccgttcaggcctgggtgacgtccttctgcgcgccgggcgcgagccgggtgccagcggcctgtcgttcgatccgagcgtaaagaggaggtgatgatcattcagcctcggggcctcactggagattgtaacgaggggtttggagactcacgctcttcttctcatcgaccggcatcgactggacgatgccctggccgccggccgaggagcccgacgactgggcgtgcttcgttgccgagaagtacctgcgcatgatcgagagagacgtcagtccattctttctgtaacggcagaatgctgctgagattgacgaggacgcaccagtacatgaggccagcgccgccgaggccggtcatggcgtagacgagcgtgtctgaatgagcgtgagatgaagcggcatagcaaggtcaactcaattcgctggccgctggagtccagctatcgatcttctcggcttgtcgggcagtgaaaggtcgagctgagacgactgaggcgaatgagagcagggtcgggtggcccatctgctgggcctcttgctgcgcgatggcgagcgatgccaggcctcgcgctttccatctcccgatccccctggcccaccctctgatcacccaaacggctccaggagagagagagagaaggaacgcactgccgccgtcgccgccgctgatgggcacgccagccggacccttctcgaccgcccgggcgggcgaggtcgagaaggccgaggaggtcgaactggagggtcgggcgacgcgtgcgatggcggccgagcgccgggcgagcgagcgggaggcgatggaggcgagcatgctgtgaagactgaagggttgatgtgggcggtaaggttgggtgaaggtaaaagtgagggtcggagaagaaggacgaggaggaggacgagatcgaaggccgtcttcgcctggggcggccgccgtaatccagaggggatgacgcgcgcgggcgtggagagttgatcggcacctgttgaatcgacgcacggccgcaggaacctcgtcgctcctcccgcgcagacaggaagggacggcggcgaaagggtaacattgaaattggacaacggggaaagagacaattggcaacagggcgggaagggaggaagaaaggggggcgcgcaggcagggtcgcagggcgggcgaagctgaggcaccgaggggtcggtctagccagcgccggggattacaacttgggcggaaagaagggtaagaagggtaggaaggagagcaggcgaggtacggtccggttggcagtggtgcggatcatttcgtttgtgaagagagagagagaggcaagagggcgggtagcccgctttcttttcgaatgagctggcctctaagtttactcggcgacgtcgctgtcctcgacgtcagactcggcggctgcacaaaaggggacagacgcgagtcagcagcggtaagaacagagagacggcacatcgcaggccgcaccgagcttggcaatcttgcgaccttcgggccggggccgctcctgcttgcccttgacgctcgcccggcgggccgggttgtccgggaagaggtcgccagccgaggcgctcttgccctcggaaatgaactcaaaggcgtccttgtggccgagagccgagcggacccagtaggtgagggcctcgaggacggtcgggcccttggtcgtcgacgagacgacgggcgagatgtcggcgacctcgccgttcttgtcaaaggtgccgaagacccagttctgaggcgggacgcatagcgtgcgagaggtgtcagccagggactgttgatgagttgcagaaggtggccatggacggacgttgtagtcggtcagaacaaagtggctgacgccgagccgacgggtgccgccccactggcgcgaccagaaccacgaggcccgcgacttcgggttgtacttgtacttcccgccgacgctgaactcggaccagtcttgctcctggaacgtcgtcgtcacggcccggacgacgaggacgggcttcttgtcggcgttgccaaagatgaactcctgacaagccggacgagacaagtccatcgtcagccagccgatgcgctcgcgacattttagcggacagggaaagacgtaccgtctcgccgaggggcgacttgccaaacgagaggccgacgcgatcgttgaggccctcgaccgtctcctcggcttggccgtcggcctcgatcgggcccttggcctcctcggccgagggcgcgccgccgtgctcgttgaggtcgagcgcagagacaacggcgagcgtcgcgtcgagcgggagcttgacggcagcgagcaggtccttctcggacgagctgcgagcaatcgagcgaggagaggtgtcaggatcgctcaatcaatgaccagggtccgcccacgctgctgcgcaagacgacagacgcacaggttgagcgaccgggcggcgaccgtcagttgggggaagggcttgcccgggtgagccgggatcggctggtctgggagcgtcttgttgaaggcggcgacccggtcggcaaagtcgtcgaccttgacgagcgtcttgagcgagccctcgttccaggtcggacggggcgtcttgccgccttgcgttcgtcaacatcgatcaagcacagtagacggcggacgagccggaggccgaggcaggatgacgagtgggcgagcggaggagcggagcggggaaagaaaggagagcagggaggcgtcaggttggcttcgggtcacgtcgggtctgcgcggcaacgtgccggagacgcaccagttccgacggggagctcgccctgaagctcagggagcgagttggctgcgaggccggagaaaacgcgacagggagggctctggtcagctgttaatcgagcgaagaggtcggaagaagaggaggtaggcgaaagcaagcccatcggggtcgaagagggacgaagagggagatgagcgctacggggcggagctgtccgcggggcaggcgcagcactaagacgagcgcgaggagagcagaggagcaggaagaagaggaggaagaccgaccgaggtaggtgccgaggctgagagcgggctggggcatggtgaaggatttgggaaaaaggagaggggagagggtggtgggtgtcggagaggaagaaggcgatggctgttgacgtctctttgggctgaaagctcgccggccgacggaccgcggaagtggtcgtcggccgaggctctgctctcgctcgcaagttggccacccgtcatcgctgtcagtaccgaggagacgacctcgaccctgccagccctccctctgcttctctccttgcctgcgtcccatttgtatctgcatgctgctcgtctcctcgtcgcgcccctaccggcggcatcgccttagcccgctttgcgtcgagcgtgggaagcttcaggccggctgcgcgtgcgaaccttttttaatcttttactccgaggcccgctcttttcgcgcccgtcgccgccctcccgacgctgcttgctgccgacgaccgacaactcctcatcctcgcgcgctcttctcgacccccctcctcgcacccccgcccagaggacatcgtgtgcatgctgtacacggcccgcaccagtgacgactgtacgtggaccgattttaccgctcggccttcgcgggagcttcagtgctgaattgcagcccttatcttccttccctttccgcccttctgactcgaccgactccgtccctcccgaccgcttcttctcctcctcctccgccctcgcccatcgccgccttttcgcctgctctctctgccaacagacatctccgagcaagtttaccgccagagcaatccttaggttgcgccctcgcacaccctcgtccaaccctcacttctctcctcgcctcgtaaaaaaacccctcccccccatcttcccctcccaaccgatgcttcgccagctcgtcgctcctgcccgcacgtcggcttcgctcaaggcggctcggtcgttcgcgacctcgcctgccgcccgggctttccggccgtcgctggctgtccgggccgtcgctgccccggccgtcggcgactacaacagccccgccgacggctcagagtcgaccctcaactcgccctcggagctcgcccggcgcatctcggccaaggtcctgcccaagcttgtcaagcctgacgtcaagcgcgtcatggtcgtcggctcgggcggtctctcgatcgggcaggccggagagttcgactactctggtccgtatttttgtctgacctggctttcgccttgctgccaggccgcgtgctgacttctgcgctgcgtgttcaacaggctcgcaggcaatcaaggccctaaaggagtccaacattgagacgatcctcgtcaaccccaacattgcgacgatccagacctcgcaccatctcgcgtccgaagtctacttcctccccgttacggccgactatgtcgccgcaatcctcgagaaggagcggccggacggcatcctcctgacgtttggcggccagtcggccctcaacgtcggcatccagctcgacaagatgggcatcctcgagcggctcggcgttcaggttctcggcacgccgatccgcacgctcgaggtctcggaggaccgcgacctctttgtccaggcgctcaacggtgggtctccgatcgtctgctctcgctcgagcgcgcaaggcactgacgaatcatctctcgtccgcagagattgacatccccgccgcgcagtcaaccgcggtcggcacggtcgacgccgcgctcaaggcggccgccgtcattggctacccgatcatcctccgctcggctttctcgctcggcggcctcggttcgggctttgccaacaacgaggaggagctccgcgacctgtcggccaagtcgctcgcgctctcgccccaggtcctgatcgagaagtcgctcaagggctggaaggaggtcgagtacgaggttgtccgggacgcggccgacaacacgatcatctgctgcaacatggagaacttcgacccgctcggcacccacacgggcgactcgatcgtcgtcgcgccctcgcagacgctgaccgacgacgagtaccacatgctccggacggcggctatcaagatcgtccgtcacgtcggcgtcgtcggggagtgcaatgtccagtacgcgctcaaccccaacaagcgcgagtacatggtcatcgagatgaacgcccggctctcgcgttcgtcggcgctcgcgtctaaggcgaccggctacccgctcgcttacacggccgccaagattgccctcggccacacgctgcccgagctgcccaacgccgtcaccaagacgacgacggcgtgctttgagccctcgctggactacattgtcaccaagatccccaagtgggacctcgccaagttccagtatgtcgagcgcaacgtcggctcggcgatgaagtcggtcggcgaggttatggccgtcggccggacgtttgaggagtcgctccagaaggcgatccgccaggtcgacccgcgctttaccggcttcctgccctactggcagcctgaggacatggacgacgcgcttgccaacaacaacgaccgacggctgtttgcactcgcgcacgccatgatcaacctcaactactcggtcgaccggctccacgacatcaccaaaatcgaccgctggttcctctacaagctcgagaacattgtcgtcgtccacaaggagcttgaggcggccgccggcaatctcgaggcccttaccgaggaccttgtccgacgggcaaagaagatgggcttctcggacccgcagattgccgacctcgtcaagtcgaccgagactgaggtccgggcccggcgcaaggccctcggcgtcacgccgttcgtcaagcggatcgacacgctcgcggccgagtacccggcccacaccaactacctttacacgacctacaacgcgacctcgcacgacctcgagttcaacgacaagggcacgatggtcctcggctcgggtgtctaccggatcggctcctcggtcgagtttgacgtgcgttccccccaagcgagagcggcaccttctgtcgtctctttcttttcgcctgctgatcccccttgccctcccctcagtggtgcgccgtcacctgcgctcggcaggtccgcgacatgggaaagaagaccatcatgatcaactacaaccccgagacggtctcgaccgatttcgacgaggccgaccggctctactttgaagagctcggctttgagcgcgtgatggacatctacgagctcgagcaggccgagggcgtcgtcgtctccgtcggcggccagctgccgcagaacatcgcgcttcggctcaagcagacgggcgtcaacgttctcggcaccgacccggcccaaattgacaatgccgaggaccgccacaagttttcgtcgatcctcgactcgatcggcgtcgaccagccggcgtgggctgaggtgacgacgctcgacgccgcaaaggagtttgcggccaaggtctcgtacccggtccttatccggccctcctacgtcctctcaggcgcggccatgaacgtcgtctgggacgagtcgacgctcgagcaattcctatcgctcgcggccgacgtctcgcccgaccacccggtcgtcctcaccaagtttatcgacaacgcccaggagattgacatcgacgccgtcgcccacaagggcaagctcctcgtccacgccgtctcggagcacgtcgagaacgccggtgtccactctggcgacgcgacgctcgtcctcccgcccttctcgctctcggaggacgacctcgcccggctcaaggagattgccgtcaaggtcggcaaggcctttgagatctcaggcccgttcaacatgcaggtcatccgcaagccggccgagggcgacgccgaggccgagctcaaggtcatcgagtgcaacctccgggcgtcgcgctcgttccctttcgtctccaaagtcctcggccataacttcatcgacgccgccacccaggctatcatggacaccaacgtgcccgagccgatcgatctgatggccgagaagcgcgattacgtcgccattaaggttcccctgttcagctggggccgtctggccggtgccgacccgtaggtccttttttttactggactagaagcgcttaaaccgccctgctgacgcctgctccttctttcttcctccccccctcagcttcctcggcgtcgagatggcctcgaccggcgaggttgcctcgttcggcaccgacatcatggaggcctactgggcctcgctcctgtcgacaactggcttcaagctgcccaaagctggctcgggcgtactcctgggcggtgacatcaccaagcccgagatgcgctcggtcgcaaagggcctcatcgacctaggcttcaagctttactgctcgtcgccgatcgtcgaggagttcctcaactcgatcccctacatcaaggcgaccaagatcttcttcccgctcaaggacaagcgcaagctgaacgaggtctttgaggagtacgagatccagtcggtcatcaacctcgcccgctcgcgcggccgcgataccctcgacgaggactacgtcgcccggcgcaacgccgtcgactttggcctcccgctcatcaacaacgctcgcctcgcccagctttgggtcgaggctctcgccaagaagatgcccgccggcggtctcgagggctaccaggagggccggatcccgtccgaggtcaagagctggaaggagtgggtgccggccgaggctgccgccttccccaaggcggcctagtcgccgttttttcctttggttccgaaccctatcccttttgcatcaaccctcattcgcaccctagatcacacaacagctccccttcgcacctcgtatccgcctcttgtaatgccaatgcgcgacctcgtcgcgtcatcccaatatgctcgagggcctgggaagagttgccggccgtgtcgctttgcgagcggacatcggccgtagcgcagatgggacgaggcgcctctgctgactgcaccgaccgagctgtcaggcacacgatgtcatcgatcggccggccggccggtcgccggtcccgcgagagggcgtcgactggctggcgacctacgcgtcgcgcctcaggcgcccacaacttcatcagaggggccgccaccgccagattcgttggaggaaggatggaggaggccggcgtcgtccgaggctgtcgagggcgagacgtcaaaggcgggtcggcgtcagagggcgggatctgcgtgtccggtcgatgggccgtcgactcacggaggccgtcctcctcagaatcctcaatatcatcagtgtcttcaggatccgcaggaaagggcacggatcctcaaatgggcaagactgtcgtcgtcagcgcaggcgaacgagaagatggagggaacacgacgcacgagggatcttacgcttctccttcttccaggaactgttgcggcccattctacggatgagcatgaagctaggatcatctggcgtaccgctcggggacgggacggagagcgtcttgtggatggagaccggatcgatttggagacgctggcctcaggtcttcagatgctttggcgggaacacgattttttcatcgtcctcgacgaaccagttggacgcggtgatcgcgctccgggcccgaaagacgtcgccgaccgagacgacctttgagcctggggtcataaagtcgcaaggaggcgagggcgccgttgcgtcggcaaggctgactcggaggacggccttgtcaatcgccggcgaggccgcggcctcatcctgggcccgcaggcaggcgagcttcactggacgggcaagtttctgccccgcgctgttgcagacgaccatcagctgggcgaacgaggccgtccgctgcgagtcgacgcaggcaaaaagcgggtggagttcgagccgggccgaggctgcgatgccatggcaatcgacctggcggaagatgtcgacgagctccttcttgtcggcgtgcgtctccttgaagcgcagtcgggcgaccttcgggtcgacgacgatgaccttgcggacgaggtggtagaagccgcgactgcaggcctcaagcgacttgcagctgccgtagtcgagtgcggcacggacgagcgcccagaccgaggacggcagcttcacgacgtaaagctccgtcgtcagcgtcgagtacgcatcgggctcgcgcgcgtgagcgagggccgggtctacgaggatatctgataaatgcgtcggtcagcgaccaggtcaacgacaccccgttgcgatttgacgcaccgtacacgtaaggccggccgactgggatcggaatgcaacgcttggcggtcgcagctttgctttggggaacgtgacgagcacgctcgacgatccggaccgaccgagaggctcgattccggcgttgaagaagcgctggattttgttgacaatgagctggccgagagccttggttttcgggatgccgttggcaacggcggtgctgcagcgcatctgggagatctcgcaggcggaacggaaaacgctgttgacgctcgggccgcggtcattgctgagccatttgcgcggcgtctggccgtcaataagcggctcggttcgatgccagcctgcggaagggaccgcaggggaagtcggaggctgacggcgagttcgttgacggtcggagatgtcgcgtctcgtgctgggcttcgaggctgctcaggaggattggcttctcaagccgagaagccactctccctgtaagttccagcggacgacgagcgagtcgacagaagagagcggcgtccagtcaacgcaacggaaaagcgggtgcgacaggggctcgacgtcgtctatgtgaacgtcgtgaaaagcgagcccgagctcggccagaggcttttgaaggagggcactcggcttcgaacagtgccatcgttcggattcggtcgggcttgccctcccggaagcggacggcagccagaaacgggtcgtcgacgagttgacggaacgagccgttgagccgcttggccttcttgcagttcttgcagtcgagcagggtcgcgatctgcagccaagtctcgaccggaagggccggcgacgacattgtgtgtggagcgatgatgatgcgagcggtagtatggaggaagagtcgtgcacgggctcgtgggccagggcgaggcgaggcaagggtgaggtgacggcgagagcgtgggtcgaacgtggcgcttgccgtctctgtagaggcagcggctgagatcagctcggcacctggcttgcgggtgtagcaagctgctcacgtagagctcctcttgcctgccagaggaggtgacgggtcgaagagacgctgcttgtgccggagcgagcgcggtcgagagagggttcgaaggcagctgcgcggacgtgcctggaagggccggccttcgactggtgccaagagtccagcgatggcctgatcagtcgatgtcgccgtgcagaggagatcgaggagcatacgatggagtccagagggttgatctagctgtcgagggacgggacaaggcgccctcggcgtcgaaggagcgggatgatggtcgaaggcgcgagagcggcagaggtggcgagccctcgtacctttgaccacattcgacctcgcctcctgccaacagctcgccttacttacctagtagcaggaccttcgccggacagattcgtcggacagagcacgtagacacagcctctcaatcgtctctttcgcctccctcgaaccatcccgccaccatgccgtggctcatctcgcgttggggcgacgctgctctcggcgtcggcaccggttgagtccctctccctcctctgcagcctctggctttgctcagggcacttagctgaccgtgctgctcatctcccgctgcactgtcgcctgtcgacgacatcctcgtgatcgaacctggcctgacgcccggccgctgcctcggctccacctcacgacgcacgctcggcctcgcctggtgttcaatcccatcccactcgccctcgttcgaccactcctcgccctcgtacgcctgcccgtcatcttccactggctcgtcgttggcttcccaggtctcctcgccttcacgctcaacgagacgaacccaaagtcgcgcccgccgccaggccacacgctgcgcgagctcatttcgtggaaggccgagcggaaccgcgtccctcggccgcctcgcaggtcgacggcggcggacgtggaggccgagacggcgctcgagccggaggttgcgagtgcactgagggccgcgagagatcagcaggcggcgacggcagcggcagcagaagcagcggcaggcggcgaccgccatcgggtttgatcgagcggcagcagggcaccgctcgtcgccacctcaacccgttctcatcggtcaccacgagtggagactgcgtatcgaagacgaaggaacgccatcggcttcggacgccttgccgccgaggcctgtatcatgacgactgttcacgacgcacgccacggacgaaggaggcaattgcgtttcggtagaatgggaaccgagaaatcccttgctgcagctaatcgaggcgctcgtctgctggcgactgacggtgcttcagaggttgagcctggatctgccgcgctcgaggcggacaacgtttcggccgttcgttctcgctcagcctggcagccatcctgcgctcggccagctgatcggtctctcacttgcctgttctcatagagtgcgaagggcaacgacctccactcgaacatggcccggccccttgaggtgcgtgcacgcgcgctcgctctcgcccttgccccagcctctgaccatgctgactggctgctcttctggcccgccctgatagcatgccgactcgatcgtccaaaaggcctacatcgtgcagcagcacgcgatcgcgcctggctacgcagacgccatccacgcgatgctaatcgaggacaagaagcatgctcgccgagatcgccccggcgccaccaacggccaacctcgtcggcaagaacgccgccttcccgctcagaaggtctccagcggtcgctcgacacgaccagactgtcggcgacaccttgcaggcttggggcgattgagcgtgccctccgcctcgtccggtcgcagcctgcgagacgacgaaccccctctcgccaggccccaagccctgtctgcctggcccaactcactcccgactgccgcccgttgcacgcacctgtctcttgctatcaatctgcatcacgaggagctgagctcaacgacgtgtgcagacggggtgggctgagagtatatatcgacgcctgccgcccctcggagccgatcgaaagcgatgacgcgcgtcggagcgcgactccgcactcgatcttcgacctgcctgcctttcgtcgtgaggagggtcggagggagggagggcgagctcgactcctcctctgaccagcgactagcagccatcagacaagatacgacacccttcgatccagcagcagcggacgacacgatacttgccttcctaccccgcctcctcgtgctgcccagcgtctcgactccaacgatcaccaccaccaccaccaccaccttcgccgccgccgtcgctcgctcagcctacctcttccaaaagcagcaacgcattcagctacaacggcccggactcctcctgcgccagccctctctgctgtcaggccttgcccgatccttcagcagctcaactcgaccagccctccgccgccgcccactagcagcctcaccgccgatggcccctcgcccgacccgccaggcaagctccgcagcgacccagattatcgcctcgtccatcgctgctgtcgaggacgagattgacatgtccgatgccgtcccggaagcgccgtcgacgggtggaaagcgcaagcggaccgcacccaaggcgaaggcggccgatgagcggaggacgccgacccgggctgcggccgtcgctggccggcgcaaggccgctctcagcacgaccgacggcgagtcggccacgacggccagcgacgacgacaacggtggtccgccatccctggcgtcctcagcttcatcgtcgtcctcggcccggccgtcctcgccgtctgaagccgacgatgacgacaacgagtcggacatgagctcgctcccgccctcgccgccgtccaagaagcctgccaagcgagcaaagcggacgccggtcaagcggccggtcgccgatggtctgacggtgggcgagatcgaggccgagctgccgtacgagtacgacccggagacgacgtctggtccaaccgtatcggccgttgttgctgcgcctgtagcaccggccaaggcaaagcgtgcgtcggccgctcggaagcccaagaaggcgccctcgcccgagctcgacgaagagggcaagcccgtcgtagatgcgtccggagcggttgtcctcaagacgccaaagaagggcggcggtcgcaagaaggtcaaggagatcgtcatccacgacgtgcctgaggtcgagaagctcacaacgacgttcaagggccggctcggctatgtgagtgtgcaggcctcaaaggacggattaatgaaggccgcgggcttatgctgctctacttccgctccacgtaggcctgcctcaactcgctgcttcgcgatgcgccgacgcccgtcttctgctcgcggacgatgcggctcgcgacgttcctggccgagacggggcacgagcggctcgttgagctcacggcgcagaatacgactgacctgatgacgatcctcgagtggaatgccaagaacggcatctacctctttcggctctcgtccgaggtccgttcagtctgtttttagtctcctctcggcctcgttgcgtcggctgatcctctcgctcctcgattcggttcctgcagatgttcccctttgcgtcacacaaggagcacggctaccgactcacgtctctgccgatcgcccacgccaatctacagaaggccggcgcgtttgcaaaggagcacggtatgcgtatcaccgtccacccgggccagtggacgcagcttgcgagcccgcgcgaagtcgtcgtcgagaatgcaatcctcgagcttgagtaccagtgcgagatgctcgatgccatgggcgttggcaacgagggcgtcatggtcatccacatggtacgtgcctgtcgactcgtcctcctccaatctacgagggcccgctgacagcccgactgcatctgttcgccttttcagggtggcgtctacaatgacaaggagtcgacgctcgctcggttcgtagagaactacaagacaaaggtgcccgacaaggtcaagcagcggctcgtcctcgagaatgacgaggtgcgtcctcccccctgcgcccctgcgatgccgctgacacagcgctgtactcagatctgctactcggtcgatgacctcttgcccatctgccgggagtgcgagatcccgctcgtctttgtgcgtcctctacatcctgacgtcaggcgtcatctcacttctcgcactgactcgtcgaatctcctcgctctcgacgacctcgtcgcacaggactaccaccacgactggatcaacccgtccaagctgccgacgccgctcatcatgcccgagatccttgccacctggaacgtccgcggcggcgttcgcgtcaagcagcacctgagcgagcctcgcaagggcgccgtcaccatcatggagaaacgtggacacgccgaccggtcagtcctctcgctgcctctcagaatcgcccgttttgccatctttgctgaccaccgtgacgtacgccgccctgcagatgcaagagcctccctttgagtctccaggaaggtcgcatcatcgtcgagcgcgaggcggccgagaaggcggttgccgacgccgcatcttctccacccgcatcagcggccggcgccgaggagatcggcgccgagaacgagagcaagccgcagacgatatcggtcgtcggcgaggacggcaaggaggtcgaggagcgggtcattcccgagtttggcatccgaatgggcctgccggacgacgtcgacctgatgattgaggccaaaggtgcgctcacacgctcaattgtgggcggcaagattgtagtctgaccacctgtcaccactcgtagacaaggagcaggctgtcctgcatctcttcaatctttacggccttggccccgtccatcgcggctcgtaccttccgccgaaggcagaggaagaattccccgactcgagcgactctggcgaggacgagggtgcggccgagtgcgacgagaacggcgagcccatccccggcaaggcaaagaagccgggcaaagtgctgacgccgatggccaaggtacgtccgagttggctgatcgagacagccgggccctgctgacgaaatgtactgtgccttgcaggccaagcgagcgaaggctaaggccaagatgctggcggccaagaagcgggctcagaaggcggccgagaagaagattgccgacgaggagaaagcggtcgtcaaggccgaaaaggcggccgagcggtcagccgtcaaggccgagaaggaggcggtcgccgccgctaagccgaagcgggccgcaggcggacggcgcaaggctgccggcgccgatctcgcccgggtcgaggctgagctcgagaaggaggtcgagctcgaggacgagctaatgcagatggagacgcgcggtggtggatccgacaacggtcaggcagacgcgctcgaccggctggggtctgacctgtcggacctcgaggacgagtcttgaagggcgctcactctggagacacatgtgacgtctccatcccacctcgccctgtgcggatcctgcaagatggtcgtcacggtcatggcagcattgcctgaaaagagatcggcaagagaccagccctcactgctggcagtagttggaggggaagatgcccgtcgcgccgctctttgtgccctcccaccagccctcgccgtaggccttgccgacagcggtcagcgcgatcgactcgccctcgacgagggacagctcgtccggcccctgcgccgtgtagtcgtataaggcggtcactgttgggaaggcaagagtcagcctcgcgcgacgccatcggtcagacggcagcgggacagaccgtattcgcttccgccattctgagcggtcgaggctgacgatgctgtcgagggcgcgtccgcggaggccgagagatacgtcgccgggacgagccctcgcgcacccgacatgttggcgaccttgacccagcccgagccgtcgtcctcctcaatgacgaggaccgtctcaccctctgccggccgtcgaagggtcagcgccgcatcttgtctgagggcaaagaggcacgacccacctgagacggagagctcgaagtccgacgtctggacgtagtcgaacatgaccgagacttgccgcccggcctcgtcgtcgttgtcttcctcgctctcttcttcctcgaccgccaggccgctcgagccaggtagcggaggcggcgcgcgcgagctgccgcccgacgcggttgaaggtgcacgggaaaccgtcaaggcggtcgacggtctccgtgtgaccgaggctgatccggaggctcgcgcacaattgccggggatctgtcgggtcatcgctcgaaagtcagtgccgtcagatgccactggcggattaaagagcaaccgcgacacgaaccttcagctcgcacttcgagtggacgacgacaccgcagttgcggcagctcttgccctgctttgtcaagccccagatgctgccctcgcaaacacgacacttggtcgggacggtaaagctcgcgctcttgaagtcgtgcgcacgaccctcgcccgtttcgtcgccgagcgcgtccgccagccgggcaaggacgacgttggccgccgccgcctgggaggcgagcccgaggacctctggcaagagcggctggagcgaatcggcaatcgagtcggggtcgccggtcgtcatgcccggtgaaggaagcgaggccgtcgtcaagagcgcggtcagcgactcgagctccttcaccttaatctcgaggatgggcgagatctggtcgagcttgacgccagcattagcgaggcctgccagcgatcagcgcgacggattgtagtggtcagcattcagacgggacgatgtgaggagacgacgtcgacgcacggttctgaagcacaacctttgccgacccctcggtcgcccagacgccgacctcgtagaagccctcggccggctcccagctccaaccgtcaggctcagaccaagcgccgacgcgtcggttgccggcgacaaagacgtcgatgtccttcgaaagatcaacagcggcgaccgtctgagacgtctgctcgacgctcgcccggagcttgtcgaggtgggccgcctggaggtcaaccgccgaccggatgacgctgtggagcgtgccgagcgcggcatagtggaacgtctcgagtcggttctcaaagtcgggcatgtcggacctgtacgtcttctccttgacggcgttgctgatctcaatctcgagcaggagcgcattcttgcactctgcgaccgtcgactgagcggcctggaacgacttgagggcccggtcggcgtgcttgtcggacgaggcgaccagcgactgatgcttctgtctggcggcctcgaggtccgtacaggctgactggtacttggactgggcctgtggatgagatgcagcaagtcagcgggtgactaggtgggtgggtctgcactaggtgacgtcgcggttgcatctcggctgcgcgctgggctctgcccccgtcgcttgagcaccgcgttgccgcttcgtcggtgacgcaccttggtccgatcggcgtagaaaccgtcgcgctgctcaatcaacgtcgtgtagtacgaggcataccggccgcggatcgcctccttgtgcttctctcgctcgtggaggacgtgggcgacctggctcacgagctggtcggcgaaggaagcgtgaaatgaggccgtcgtgtcggcgttggcgaggagcgagtcgagcgcatggttgatggagcttcaggaagaagggtgcgatagaggtcagacagaacctcggcgaccgagctgagcaacaggaggaaggaaggcgggccgacccacatcgtcgcggccgagccgctcctggcagcggtttcgccgacccagacgctgtcggatcgctttgcttttcgctcgaccgccttctttgtcagggcccccagcttggctgagtactcgcgttcgagctgggcgcgctcgtcgacaaactgccgacgggcgagagaaggtcggaggggaaggcaggagggaaggtcagccgctggcctgccgtacgcccgagacggcggcgcaccttctcgagatcgctatagctcgagacgaccgaggcgagatggtggaggagcgagttggcctggtcgggtagctcgcggccgtattgcagcgaggccatgctaccgacagaaggaggaagatgggaggtcagggtgaagggcaccgggcgtcgcgtccgcctgctctgcggcggcgttactgcgccgtcttgtgatttgtcattgagaagggccagcaaccggacagcaattctcaggaagtgacgacgcactcgtgaacgaaaacgaccgaccccttcgatctcctctcgccctctcatcctcccctctcgcgctctcctcccaacagagctagaccaacagcagctctctataaactacttccgtaagtcctcgagggtactagggtgacttccggagtggctcgggacatcgccggcgatgagctgcgttgcgcgccacgccgccctccgtcatcggcagggtcggtcagcctgccggtcgcgttcaactctcttcagcctgcaggtcacgctggccagccgcgtcgaggatctctgctgacgtcctgagcccttcttctacagtttccagctcggtcggcgctccctcctctttcgccgccctcgatcgctttctctccagctcgctcctgccatggctaagggctcgtcatctgccacggccggcacgcgcaagaaggcagccgccaagaaggctgcaaagaatggcccagccgaaacgccgacccagcccgctcagcgcggccagaaaaagaaggacaaggtgaagcggggcgtggccaagccttacacgccgccgccaaaggcaccggcgccgcccgtcccggacccggtcgacaagctcgggctcgcgagcacgctcgacgccgagcttgtggtcgtcctccgccggctcggcaagaaggacgccgtcacgcggcgccgggcagttgagagctttggcgagtggcttcgtcgggccgaggacgaccgcgagagtgagggctggtgggtcgagctcgtcgtcccagtctgggtgcgtcgccttcgtccacgtggtccctgccgggctcaatcagaaggctgaccttgcttcatgatcgccgcctgctcgaccctagctgcatcatctgccctcgctcctcctcacgccgtcactgctcacgtgcacccttgcggtccaccagcaggcgctcgcgctcgctcccgacctccttgagacaggcctcgcgctcctcctgccacaccagcaacgcaacgtgcttgccctcatgctcgccacgacgctccagaaccctcgcatgccggccctcggaccgatcgacctcgccgacgacgcgacggtcgacgtgctcgtcgagtactgggagcaggcgctctttgcgccggaccgcgtctgggagtcggtcttcccgaccgtcatctcggtcgacaagaacgccggcggcggcaagcccgacaagtcgtacaagggccggctgccagtcgcccttgcgccgactgccgccgagtcgcccgatgtcgcgctcgaggagcaggagacgctcgagcgcgagacgaacctgagccacggcgcgctcctctcgctcgccgccgtgctcgctgcacgtccgcccggcccagcggctgagggatccgagagcggcggtctgcccgagtcgctgctcggcctcctgcggacgccccagctgccggcgatgctctcgagcccgcaggcgctcgttcgccgctcggcttgggccgtcatcggcgccctggctggccgatgggaggctgttggccgtgagctgctccctaccctcggacccgaggccggcaagaacgcctggacggaggaggatgcggtcgtccgggcctcaatgggcgaggccgttgtcgtcttcttcaccagtccgtcgtggcgccctcttgtgttgccgtctcagggcgctgatactggcttacctgttctatagaataccccgaggtgtgggccctcaccgacgacgatgacgaaaacgacgacggtgaagaagacgataatgacgaggacgacgacgaggagagcccaaaggccgacgagggatcgcccgccaaggcttacccgacctttgaggccttcctcgccttcctcgaggcgggctgcaggggctctgccgctcagtcttaccccctcctagtgctgctgctctcgaccctcccagccgtcgtgagtgcgctcagccgggaagaagacgatgtggtcgctcaccgcgctctggccatcctttgcacgcaggtctttcctctcacggagccatctatcaagcggctcctttcgtccacctgggcaggcttcgaccgcctccatccgtctgacgctgccgcgcgcaaggccttcttcacggccatactcgagacgtacaccttcctgctctcgcgggccaccgcccccgccgaactctacgcgctcctcggcgaccaggtcgagacggtctggaagtcgtgcgtcctcggcgccgtcgcccgggctcagggctcaggcaagcgccgcatcttcggccggccgctcactggtcggggaccagtcaacgacgacgacgcgctcgaggccggagaggcggaggcaaaggcgctcgcacagtggctcggcaaggtcgaggacgaatgtacgcttccttgcagccttgtgtgtcacgagaatgggtcgatacgggactgatcctcgactccgtcttcgccccctctagcgctccttgccgtctcttggacttcgattcgtgcgggaaccgcatccctcctcgacgggccttcagagttcccgctggccaaactcggcggcatccttgctgtgctcggcgccaacctgccgccccctctggccgaagcctttatcggccatctctttgaggttgcccgtcggggtgtcggcggcctcatgcttgacctcgacgacgagggcagcgacggcgcgtggatccggggccgaatgggcctcgtcagcgagctgatcgagcgcaagggcctcggcgacgtcctccgcgaggacgacatgtttaccaacgtcgtcgacgctctgctcgagggcgaggccgagaacgtgctccggacgctgcccgacacggccgccgcccggctttaccgcatctactttgcctggcggcaggatgccgacagcatcaaggaggcctttgccgccctctgccaggcgcttgcgggcgaggcgctcgaccggccggtccgcttcggcgtcatcacggccatgctcgatgaaatcccccttcttggcaagctcgagctggctgacaagggcaacctcggcaagctcgacggcgtctgcaggggcctgacggccgagctcacgcagggcaccgcgagcgagtccgacatcgaggtcctccagagcctgatgaaccgccctcgtacgtccagtccgtcttgaagttcgacctacatcaagctcaagtgcctatcacttcgccccgaacaggccccttcctctcggttgacgccctcgaggagatcatcgagaatgtcctcacgctctttaaccgcaacgtcttctcgttcctccacaacgatgcgactgacaatgagctcgacgtcgggctactctacgcgctcctgacgctggtcgagtcgatctttctccgccggccgctcgaggtcttcatcctctcggtcgttgcccggcaggctctgtcgtctgtctaccagagcacttacctcgtcccactcctgctcgccgagaacgccgaaacggcggcccttcgcaagaaggccacctacctctggcgggcgatcgagaatgggagcggcacgctccttgaggaggtgctcgacctcgtcaccggcgacatccggacgctcgtcgagaacaccgactcgcgcctgccgtgagtttgccatggcagtcttcaactgctgccgacccagccaacgctgatccttcgatcctcgctcttctaccaggtctgaggcgatcatggacgccatcccgcacacgcgttacctgccgtcgtcggtcgaaatcgtcacgcagctcaagacgcttgcgaagaacgccgtgcctccggcgctggcggtcatggacccgctcgtccctcagacgaccgaggtgcctgctcgagcacgcaaggccgagaccgacgtctttggtctgagctcgatcgctcggctggccgccgtcgccctcgcctcgctctcggccgaccggacgctgctcaaaaaggactcctcgtggctctacttcctgtcgaccttcagcctcctcgctgccgacgagctggccctccctggctcggccgaccatattttcggaagctcggtcgcccctgccgatctcgagcgcttcgcccaggtcgccgatggcctgcgttcatacgggctgtccacgctcgcttcgacacttgacctcggctggcaccagtcgacgatcgcgaccatccagaaggcgggaccgccggcagacgggctcgcgagtgttttgaccgccctcgtcaaggatgtccagagcacggacgccgtctacccgtctcgcgtcctccgcgatctgctggccggtgtccttcacacgaccggcgccggctccgcagaggccgagaagtggatcgcctacggccggacgatgcaggacaagggtccgtccttcacgctcgctcagcagaccaatagtcgcctcgctgatacgacgacgacacgcctcctgctgtagcccctcagcttgcactgtccctcgtcctgggctcgaaggaactttgtctcaacagcccaatcctccagcggcttcagaatgagcttgcggccgatctcaccggcctcaagccggcggccgtcaacgacaagggcctgcgcgcgcttcgtctgctggcggccgcggcgccgccggccgactcgacgaccatcttcctcccggagcgccggactgtcatgctcatgcagacgctccaggactggatgacgggcgacgaggagctcgacgaagagctcgactcgcgaacggccgagatcttcaccttcctcgtggccatcgctcaaaacgacctcggagcccactgggagtttgtctttgatctgctcgagtccaatcttgaggtacgtctgggcccatccgtctgctagaggcccagtgactgacgggcgactgcccattgctatcctaggccgcctcctgggaggacgcatcgacgttgcctttcctcgcacacacgcttcggctgctcgcgacggtccgcgaccttgccagcgccaacaaggcattgcgcgagctctggaacaagcgcaaggacgcgtcgctcgccttcgtctttgacctcttcatgtccgagacggagcgggcgatgtcgacgccgcttgccatgtgccgcgatctcatcgtcgacctgatggacgagcttctggcgtcgagcatcacgggcgagcgcttcgcgcaggtccgtcgcggccgtcttcaacactccttctggcgtctgctgctgacgtcagtcaccgcattcccctccgcagctcttccttctgctccaggacccgtcgttcgctgtgcagagtacggcacaccacctgcttcaggaagtcatccacacgcagacggccgatctcgttgtcaaggcggcggttgagaccgaggagtcgacactcgacctcacgctgccgaccgagctcatcgctctcgtccgaaacgctgttgacctgccagaggacgactcacacccgacgcaggcggtacgttctgtcgggcaggatgctccagcggacactcgctgacgggtactgctctccgctctctcactagttcggcacgctgctcgcctgggatctcttgtttgaatacttcgaggatgccgtcagtcgctgtaaccttcgatcaggacctctgaacccgcgctgacgaagcttccggttctgcagtccctcaagctcaagacgagctacatcgagcagctccggaacgaggacctcatttcgacctcgttcctgccgactattttcacggtcctcggcgtgtctggctcgcgcgaacgcgcgtttgagctcacaccctgggcggtcaacgagttcatgcttgagcgtgcgtcatgacctgtccgctaatctcaacgcgctgcgacgctgacttttcttgacgcggccttcagtctacgataccgaggcaccggcggctctctcgctcttcgctgcctacctctattaccacgcgcttttacgggtgccggtccgtcctctcccaaagcagcgcccatgtcataaccggagctgacgctcgctatctccctgtcagtcgctcatccggacctggtggctcgagctcaaagaccggcaactgtcactcgcagtccagacgtacacttctcgcaactttgcgccctacgtcatctcgcacgagctctcgacgctgcgcgagccggcggcgctggccgaccttcaggacgacagcctgacggtcagaatcctcccggccgtcaacgaggtgacggcctcgtacatcgttgacgagcaggcgatggagattgccgtccgcctcccgtccgagtaccccctcaagccggtcgaggttaaggacgttcggcgcgtcggcgtcgacgagcgcaagtggaaggcgtggctgctcgccgttcagcaggtcgtcacaaatagggtgtgtagagcgcgacgcgttgactttctgcgctcggttcgctgactcggggccttcctttcctgcaggacggcctcgtcctcgatgccctgacgctcttcaagcgcaacgtctcgctccacttcgctggcgtgaccgagtgtgccatctgctactcgatcatcagcgtcaacgaccggagtctgcccaaccggtcgtgcaagacgtgcgacaacacgttccatgcctcgtgcctttacaaggtgagcaccctctgcgccgcccgccctgcctctaggcaacatttgactgacctctttcaacctccgccttccaagtggttcaatacgagccatacatcgtcgtgcccgctgtgccggagcttgttctgagcgagagcaggcgcctcgtgatagaatgtcaaatcggaactggactcggtgcgagcacgtcggcctagtcattgagcaaacgaccgtctttgatctactgcagcccgcctcttgaggccctcctcagcggtctagactctcgaggcagtcgcggagcgcacttcgctcctcatcgacccttttccgccagacgtcgggggctgtcaagcgagtgattgggtcggtctccatcttgagtgacgcatcgatgagcgcggaagcgtcgtctgcgggcagaggcagctcggaaacggcgggtggcggcgcaggcgacagcggggccactagcggttcggaacttttttgagggcggcgtagtcgagtggcgaactagcgagaagaccggctcgataggcagcggaaggtcggtcggaggaggcgtcgtgaaggagacggaagcgaacgagcgggcgcagtcggcttgggatctcgccggccgacgcttcgtcgaccggcggaggaccttgccatgccattcggccgaggtaccgtcccagccgtgctcgacagcgagcaagacggtcgctcgggcgagcacgagcagctcggcagtgtgccgctcgaccgttcgacggggctcgagcgacgacatgtcgaggccggccgacatggacaggacgccgacgatcagcttgaccgtctcgagctcctctcgcacatcgtcatccaagatggagcacgagctcgtcggggagagcaccggtaagggcagtggctggccgaggatgacagacaggagcttgagcagaagcgccggcgagagcgaccgcaggtgcgggagtgaggccgggtcgaagccaagcgaggccaggagcgagcgcaagacgggaatgatgggcggcaaggccggcgatgatcgaagcatgctggtcaatgtaccgcgcccaactgagggtctgagctgacaagccgacgctggcctaagtcggaagagcgaccgttcaggaaggggaggggaggtcgctgcgagaggctcatgccctgaggaggatcgcagcccgtgtcagatgttgtcggcctcagagtaagactagcagccagttgggtgcaatacacatacccaagaggagcgcgagggagagcagtatgctgctggaggctcgtctgggctgaagggcaggtcatggtcgggcggcggtcgaagatgcgatcggcttccatcttcgcctccccgcctcgcttcctcttgacgacgatttcctctacgtctctctcagttgaggtcctatcaacagcagcatggccagcacgtccgcctcatcatctctgcccgcgctgaagcgagcgctcaggaaggccgtccaacagaccctgcgagccatcccgtcgtccgcagtcgaggctcagtgttcgtccgtcaagccctccttccctccggccagccggccagctgaccgttctgctcacccttctggtcggctcggtcagcccaggagctttttcagaagatcacgacgaccgagccctacctttcgtcccgggcgctcagcatctacctgtcgatgcctcattctgagatccagacgctcccgctagtccggcacgcgctcgaacagggcaaggtcgtctacgtcccgctcatccctgctcagggccggatgacgatggtccgcctgtacgaagatgatggcctaggcaagtctggcgacggctgggaacgcgaccgatggggaataccggtcgtcggcccggagcggcccgctggtcggggtcgtcgtgaagatggtgcgtggacgccggcctttcgccattgctgcagctcaggcgattgcttgagcccgttgccttcgtacgcgactgatgggaagctgtttctctcccctttaacctagtctttgcgccgaaggaggacgccctgccgctcgacctgatcttcctcccggcggtcgccttctcgccgtcaccaaccgactcaacgacgattgaccggctcgggcatggcaagggctattacgacgcctttctgacgcgctacaacgggatctgcgagatccgatcagtgcctcccccctctctaggtttgtcatttcttcgtcaccgtcttctgaaggatgccggacctgacctcttgcccctgcacagtcggcctagcgctcaaggagcagtggctcgcgcccgggacggtacctacgggcgagcacgatatttcgctccgacatgtcgaggccgccaccggtgtaggcaacgtctgactgctgcgatttaggatgtgtgacgcacataagggtgcagagcggcgccccaagacggagcatcgttatcaagcagcagggtgacaggcagtaggccggaagggtatggcaagggacggatatagcgcacaagcgatggggagacagttgtgcgaggatgcgagcggctgaagaagttgagccgacgaaggcatcgtcgtcagctactcaggtcgaggccgacatcggcctctcgaacaaaggccgctgtagtagaccagggggcgtcagctcaagcgcactgcgcagtgaacgccggcggggtcgcacctgtcgtcccgagctcgacgatccagacgtcgccgaggatcgaggtcccgtccgagccgccaaagacaaacagccgattgtcagcgacagtcgacgagtggtagccgcgttcggggctcggcagtttgccgttgaccttcttgattgaccagcgcttccggcctgtcgaagatgcgtcagcattccggtcgatgagcaaagaagaataggccggtcgaccgatacatacggaggtcaaaggcgaggatatccttggcgtacgccttgccatcgtgccctccgatcagcaggagctggtggccgatgagaacagtcgagtggaaggcccgtgagacaggtgctccagcgagcgtccggtcgagccggtgccagacgcgagccctgaggtcgagcacgtcgaggctcgagaacgactttgtcccgtctgagccaccgcagacgatgagcttgtcgtccggcgtaacgatgcacgagtggtagcctgcggtgataacgaaaagctagcgtcagcctcggctaagcgaaaagagaagcctcagcgtacctcggtcgggcggcagcacaatctgcagcctctcgttgcccggcccggcgtctgaagggcggcattccaccttctcccagaagcttccgacgcagtcgtaaatcctgtagtagatgacagagtgtcagcgcgctgagcctcgagaagagaagaagtccagcgcaccatgtgtcgtttagggcccggtcgccattgccgcctccaaaaatgatgatcttgtttaagccccagagggctgcagagtgtgctcggcgtcgagggggcttctctggcgcggctgagcctcggcgggtcggtaagccagccgtggtcgggcgagcgttgatggccggcatcgaccaggtcagagcgaccgtgtcaaatctataaacgtcgttatgatagtcgggcccatcgccgccgccgaagcagaagatggcgtcgccgacggccgtcgcagtgtgggcccggatcggaggcggaggcgtgcccgagatacctcttacaatcgaccagcgcatagagtcgacggccagggtcgcaatgccgcggaagcagccgcctgagcccgacacgctgccaccgatgatccagatcgtgttgcggacgagcgtcgcggtgtgcgccttgagcggcggcggcggctggccgtgcagcggagccatgtacgagtagagacctgaggttggcagtcgcaaggtgcaagggttggtttgggcatccatagagtcagttaaacgcgagaggagacgcacctggacttgagacgacgggtatggagctgctccaagggcgggcagctacgaggacggggtcgccgatgaactttggcagcgcgccggcctgccgccctccctcgccgacccgcttggacccgatacccgctgccgttgatgaggcggcacgtgcgtgaggacgcggggaaggagtgataccggaggcgatgggcgccggctgccgaccatcgcccgtcgatggctggcgcagcgcagccggcttgaccaagtctggcgtgccgagggctgagcggctcgggtcaagcgttgatggaggttgttcgctctgggccgagtcgccgacaggggcagctattggatgcgtcgtagcttcttgcttgctgtcggccttatcggccgctggtccgggaggtgcaacgttcgcgacaggggtgttcgtcgaggaagaggaggtcgaggagggctcgacggccaagccgctccctcggctcgtcgacattctcgacacagctgccaggagtagagacacgtcagtcagctgatgctatcagtcggtaaatccgtcgtgtcccaagcaagggagggcaggttgcgtcgccggcacggcggcagctgggccgaggagggacccctttgatctgccggcgagagccctcgccctccatccgaccctccaggtctcgcacaagtagcaagcgagcagcagctcacctttagcgccttcctcgagtccgggaccgcacaaaggtcttgaggcacgcaaccctcggtcaacggccgcgtccgccatcctcgcaagcggaggggtcgctgctgcggcgagcaggagctcggagtcggcacgcgcctggtcaagaatgcgggttgactgaacggtgggacgagcgactgagggtccgcgaattggaggtggagtcgtcgaggccgtgggctccgtgtgcaaagcaggctgggatggatcgagttgaggatggtcggcggcggcgagcaagaggcgaagaggacgagctcgagctgaccgagggtccgcgcagcagaagtcggtcggcggccacgacgaggtcaagccggatcgcagaacgatcacccagaagagccagggacaggcacgagatcagcgagcttgcaagagaagggcctggtgatgttcttgattgttgactttatatcaagggggagggcaatcgatggagaggcgggcgagatcaactcgataccagcgccagctccggcccgttttgtgcgaagggggtgccgactcgtcaagagccggccaggagacccagggaggtgaaggaaagagaccgggatgtgacccaagaggagagtgtgatgaaggcggggggcgttaggacgtgtctatgcgggcaggagatggcgggcgtctaagggaagtgtgggtcaggggggttgtggcaggctctagtggtacgtgcaacgagtggttgggtgtttacagccgagggtgtttacagccgagtgcaaaaaggtcgtgaaggagcgagaagggtccatgtggttgtccgccgctggcagacttttgtttagaagaacgaggccgtcgagttgacggcgaagaggttgaagaggacggttgcgttggcagccgtggcgttgacctcgtgagcgagctggaaagcggtggcgttgaactcggagaagttgccggcaaagcagatctcggtgacgttggggagaaggttgttaatgagggtcgacgacgagttgcccgagagggtgttggtgccgttcagctcggtcgagtaggtgccgttgaagatgacctcggtgttgttccagaggatgagggtgtcgttcgggcaggtcatggcctggacgtgctcggcccaggtgccgacaaagagcggggccgacgactcctcagcggcaggggcggcggcggcggccggggtcgactccttcttctcctcggcggcaggggtccaggcgggggcagcggccgaggtggtcgtcggctcaggggcccaggtggtcgtgggctcggcggccttccaggtggtggtcggctcaggggcaggcgtccaggtggtggtcggctcaggcttccaagtcgtcgtcggctcgggcgccggggcaggggcaggggccgagccaccgtatgaccagtcggcgtagatgacaccctccgagtgcgcagcgagggcgccgaagaggccctcggagaggtcgaggccgccgggggggcacgtagggcaggtgtccttgatgacagcctggaccgtcttgccgttgtacgtgatcgaaacctgcttgccgcaggcgggcgagggccagccaccgccaaaggcgttcatgtcgtgggcgttaagggcgacggtgtactccgagttctggtggagctctccgcacgagccgaggccgacggaggtgtcgtctgcaggaggggaggaagcaaggattggaaggtcagccaggtgcgccagaggaggcattggtgggaagcaaagacgcacagtaggtcatgcgagcaccaccacgggcggcgataggcgcagcgacggccgacgaggcgaggagcgacgaggcgaggagggcgaacgaggcgaacatcttgtcaaaagaggttggcgaaaggcggatgaaagggagtcggccgggaagagaagaaggaagagagtgagaggcgttggggataggatgaggaggaaaacgaccctccctgccctcctcactgcccgtctttgtaggcttgccctggcctggccgacggcttgcatggccccttgaaaactgtcggtcagcgcggtcagcgcggggcaagaaatcagtgcgtgccggtgtgaagcacggaggacagaatggggtgaggcatcgtccggggggaaagaatggtggcggcgacgggaggatggttcatagcacctggcgacggaagctcaagctggcatcgctcgatctcggccgctttcgtccagcttccgtcgtcgtccgtcggccgggattgcgaacaagcattgctcagagaaccctgctctgctcaattgagagcgcgcgcacgggcgtatgtctcgctttccttaagttttcttttatcagctcaaacgctcccgcctgcggcagaggacaaggcacgtcgcccaacacagccgggcggggaatcgctgccggcagtcgccctcgaacctgcaagcgctttcacatcgacaatcgagtgcccggcgggcgcaaccaatgccggccagagcccgcacgcgccgacgcaccggttgcttcccggaagagacccaaccgtcgtcttcgccctttctttctcgacaggccagcagtttggggctctcgattctgccttgaaatgcaaatgcagttttggagagagtcggccggccgagagcgcgctgatcgtccttcagtccctaacgtcgttgcttgcgtttagactgtgcgacaagaaaaaggtggcacacgatcagcccgcctctgacgtcgacaactcagccgccagggtcatgcctgatcacgagagcaagagagggagggttggagcctgtgaagagcgacgcccccaacgggctcgaggttcgacgaccctctgcgctggctcagtcgcgtgcgcctgctcgcgcggtggcggcagacctctctcgtggctgaccgtcatgatcagcaagggtcccaccctcgctcccctcccagccctcgatgccagaaagactcacagccatggtccggctcgctcaaccacctcgacgagtttgcttgcccctgaacgatgtcgcttgccccttatcccaagaagatgcgacagttcggacgacgcgacgcgactggtttggcgcggcagcgcggccggctcggcctcgcctcgtcgctcagtctgccctcctgcagccccgccatcgctatacctcctccgctcccttctgtcttgccggcaagacatctcgatagggagatcgtgcgtgctcctccttcagcctcgcctggatgctatcccatcagcacgagctgacacccctgtctcctgccttcccccgccttccctcgcccgcctcccgctcgaccagcttcccttttcttcttcgccctcttacttgacctttcgagcgctggccgcttggctcgacgtccgattcgacctcatcgctagaaggccgtctcactcgacatgcgcctcttgccggcctcccgggccgccctcttgctcgtgcttctggccagctcggccacctctgccgagccgttcgaccaccggcagcttgctctcgcctccagtagcaaggctgagcgaggaggtctcgcgtctgggacgacctcgcgtggcgggacctcgcgagcaggcccttctgcgacccagcggccggcagctctaacgactatggcagctcggctgacggcgtcaggggcgcgagccgccagcagcacgacctcgctagctctagccgcaggatcgactcggtcatctcacagtaacgtcctgtgcgtgcacttcctagctacacggcaagaaggcgctcacgctgacgtggcccttctcagacgaacgaccagcgtatccccttccacgggcccggccgcccagacgccaaccttgcagaccagcatgcgcgcgacgctcgcttccagccttgtctcgtcttcgagcctggctccgtcctcatcctccgtcgcttcactcgcggcgtctcaggtcggcggtactattcagccgcccctgtcagcgccttcctcctcatcgaccgctgttcggaaggctgcagcctctgtcacgagcgcgacggcaagccctcacgagatctcttcgacggtcacggtcaccccgccggcgaccaacaccggcgctgcgtcgaccgctcggcccgccgctcttgctgccgacgccccgaattcgcccttccagcccggctcgcgttggttcggcctcgtcctgacggccctcatcgtcggcggtctcctcgccccggccgccatcttcctcctcctcaagcggacctgcattcgtcgctcgtccgccagcggtcgctggaccaaggccgacgaggagagggccctcgccatgccttgggacccacccgcggcggccgcgctcgaacgacagcactcgacctcgccctcggcattctcttccggtagtggtcctgccggctcgcttgagagcccgccggtcgccgttctcgacctttatacaacggccggccgcgcccagcacgagtggcttgacaaccgcctgcccggcttccaggcgttccctccgccgccgcctccgcgacacgctcacgaagacgcatacgacgccgatgcggccgaggtcatcctgccgccgagccgggcctacctcgtccatcaggcgccggcggcgaacggcccctaccgcccgggcgagttttgacctcatccgataggtcggcaccgaccgacgcctagctcgccctcgtgtcctatccaaagtcacccctttcccttctttcacgcctcatgatccccactccacaaacccgagacgacccctcactcgttccttcatccgcactttcccttgtactactcacgaccctgcgctggccgctggagaccgacaatcacatgcacgaccgctcatccgctcgaatcgccgcttgcaaaccgcattctcgagctggcctacgcccgtcgacgaccgagcggtcgtgcgggactcgtccggagggccgctagcgcgtgatccacaacaagttcatcgggccgcccgcgtacgaacaatttcgatcgcgctgccggccctggccgagggagggcgacgaacggtctgtccttgctctgctctgctctgcaaccatcacctcgtgccttctgctcgccctctcgtacaccccggtccgcctgctgccgaggacccgcctgcctgttccggacacgctgctcgtgaggagagagccagtcggaagcccgcccgcccgccagctcgcatcgggcccatcggagctcgtccgtcttccgcctccactcgctcgctctctctcctctcgcaggcgaccttttccttcaacagcatgccctcgaccgctgcctcctcgtcctcgtcctcttcatcatcctcggctgtacccaagccgcggccgacgctcttcgggccgtcgctagaccatgctgttgcgggcctgcttgccggctcagtcacgacgggtgcgttcgtcgcgcgcgaccctcccctttcagctcgacttgcgagctcgcctctcaactgctgatgttctcgacgagctcgcatgcgtctcggcagtggtcatgcacccgctcgacctcgtcaaggtccgcttccaaattgccgacaagggcaagggcccctcgcgggtgccctcggccggctttggacgcgaggtgtacggcgccatgcgcgaggccgtcacaaaggacggctggcgggggctataccgcggcctgagcccgaacgtcgcaggcaatgcgagcagctggggcctctactttctcttgtgcgtcgccctccgccgtccgagctctacatcggcgcttctccccgttgcacgtcgcgcgaactcgcccctgaccgcctcgtccgctgcgccggtcgtgcctcgctcgtctgacagctaccaggagatcaagcggcgcaagcagggcggtgatccgcaggtccggctgacagcgacccagcacctcctctcggcagcggaagctagtgcgtcctgcttgttctgctgcagagaggcgctgttgcgaacccttcttgttgacgagcacgagcaaacccctctcttcaggcgccatcacggccatgctcaccaatcccatctgggtcgtcaagacgcgcatgttttcgacctcggtcaaggaccccgcggcctaccgaggcctgctgcgtgcgtcgtcttggcccttggctgggcgctgcagcagctatcgtcgctgatcaggcgcacgaccctgcctcctctcccgctacagacggtctgcgaaccgtttactcgcaggagggcttccgcggcctctacaagggcagcttactcgcccttgtcggcgtcacgaacggttcgatccagttcgccgcgtatgaggagattaagcggaggcgatccgacctcaagcgggctcggatcgagggcgccggcgggacgtggaggacagaggacgagatgctcgtgcgtacggctgctgaagctgtgacatgccatgtcgcgaagctgacacatagccgtcgcgccagaccaataccgagtacatcctcgcgagcggcctgagcaaaggcctcgccatcgccgtcacttacccgtatcaggtcgtccgggccaagattcaggttcgtcccgcctgcagctctgcagactcgactgaggcctgccctcactgaccgactgcctcgacgtgcctctcagaacgccaacggaggactctaccccgacattccgacgacaatcaaacggacgtacgcgacccagggcctgcgcggcttctacgccgggcttgggacaaatgcgatccgcatcctgccggggacctgtgcgttctttgtcgcatacgagaacctctcgtggtggatccggacgacggccgactcgagagcggttgcagccggcgatgattgaggagcagagcgtctgcgatggagagggcggagagcgcattatcttcgattggagctggctgcgcctgggttcggaccagcatagagggcgtcgtcgagacgctgccattctttagatttcgatggcttgctgtatattgaacgccacgacatgtagcagcagatggggttgaaatacagaggagccagtcagatcgaagcgcagccgaagcaggtccgataggaacgagcggcgacgagcaggaagtcgaggggaggagcagcggcttgggtttgatacagtcttccgcattcggaagggagacgggcaagaggggtgggaatggatgtacggggcttgcctgtatgataagggggtatcttgatgtgtcgaagccgatgatgagggggctctaaagtgcgctcgggcatgagagtgtgacgatatgagacgagcgagtgagctaggtgtgcagagagcgacagggaagtcagaagtcgcagtgcactttgcagcgtcagcttaagagaggacgtaccgatcgttcaatgaggccttccagacccgaactcgaaatgcgccgcaccctcttcaccttcgccttcgctctcctcgaaggcagccggcggggcaggcgacgaagcgtggcggctcggacgcgtgctcgtccgccaaccgctccggcggcgaacgctgcgagtgcgccggccttggtgaccgctagcggcgacgtctgacccagcgtcggaccggccgtcgctcgagtttccgtcgaagccgtcatcttccgactcagactcactctcctcgagcacgcacgcctcggcatcaagcggcgagccgtccgagtcgcgccggagtgcaagaagcgcgttggtccgctcctctgcctgggcccgaagctcagcatacgacgtcttgctgacgaggctgggcggtgctcggctcgccgtcggcggccgcggctcatggtcgggcgatgggcgggccgagagggcaaagtcgccgtcgtcggcgccgacgacgagcggaggcatgacgacggcatgggccgcctggagcaggtcgacgtcctctggcgactgcatcgccgacgacgagctgtggccctcatcgctgccgaaggcagacgagggcgactcggccgaagagggcgagccagcattaagcgagatcgagaggagctgccgcgtcgcagacttcatggacgagctgtacttgcgctgagcgggcgtgagcgacggccggggcaagaggtgcaggtgcgggagccgctcggcttcggcaagcgctgtcgctgccgcaaactgctcctcggccgacatgaccggtccagcggctagaacgtgcatcagaggcggcgaggctgacgatgacggcgccaccggcggggacgagttcggcgagggtccgagaccggccgaacggatggacaacgaccggcgccggtagccctcccgctcgccaaggggtgtcccgctcgcgctggagtgaggaggcgtgccccagtcggttccggccgaggggaacgctggcggcggcgggatggcgagcgcaaagtactcgccggcctcatcatcgccgtcggcgacgtcgggatggctgccggtcggcaacgggtgctgaggcgtgagcacgggctcgccgagcgagggcttgaagccccagcctgcaggtggaggcgcggactgctcgtcgggcggcgagggcgggcacgcgagcgacgaggtcgaggtcgaggttgcgttgctcgccgagctcgagtggcgcgtccgcgagggcgcaaagtcgcccgtcgaagaaggggcgagcgaggtcatgaacgaggtcgtgtgcgctctttgctctttctctagcgtcggtagaggagaggtcgaaaagaaagtggtcggggtagagcaagcggccggttgtcggaaggaaggagagccggaagggaggacgaaaggagggtgtggggctgccgagagggaaagacggtcaccgactattcagcggatttgatcttggtcgtcgcggcagtctttcgcagcttgttcgagcggcagacgtacatggcgacgagcagagacgagaagaacgggcagcgagcgtgggtatggccaaagggaggatggacgaggaggcggaggttgaggcagccgttcgggacaacaccgcgaaggacgccggctccgtccgcagcatcagcagcccccctctttcccacgcgacggccgaacgggtgcgcgcctcttgcaaaccaaacaccgcccgagggtggccagcaaagtcgggccgctttgccggcggcaaccccttgtgaacgacatcgacagacaaggacgacgcatggagacgagtgcccgacgaggcaggcctcccttactgctcccaacatgggccggcactgctgaccgggctgacgtctccctcgcggcctcacttgccctgctgcacctggcgaacctcgaatactgcagcacgcagccactgccccacttgcgacttgcgctcgcacgctcgaccttcgcccgcttgtgcacggccgactcgaacgcgtctgacgacggagaggcggccggcttgttgagccctggccagccactcgacgacgacgacgacgaagcatcggcggcctcatgctcgtgtgcgaggaagcggtcataccgcgcccattcgggcggcggtgccggggcgccgtatgtcttctgatggccgtcgtcctgcgccggcccgtgccacggcgcgtggagggggaccagccggctaagacgaccgccgagggcggcgtcgagacgtttgaaagccggccggagacgtgcggtggccaggggatggccgacaacaatggcaattgccggtcggtcggagggtgctcgaagctgggcggaagggcggcctgcgcacgagcgggcgttgcgagaggcagcagcctggttgaccggtcgggcggggcagcgtgagggagcgcccggcccttgcctttgtgaagcgacggaggctgtgacgggagccagaagtctgccggctgcagggtgcgaaggtagcgggcgggaggtcaggcaagatacaagcaacgacagcgctgaggtcggccctcgtctgtcggccacttgaaatcgtcgagcgcagaggtatcgtctgtcatctcctttgtcgagtagatgttgctaggcaacgtgggtactcgtgacttcgatgacatgatgccaacccagcggaggcactccgaaggatggcaagtcaacctgccgtttctggcgttgcgcctgactcgtacggacctcgctgccgagaccgaagctgtcaagcgcgtcctggtcggcggtcgagagcactgagagacaggcggcgcagctcgggctgatcgaagcgggcgacgctggtggggcggagggcgagtgagagggcagatgacgagagaggggttgccgctgtcgtgtgcacacagtggcagcgggcgttagagagaagagagtcgacgttgacgcaccggtggaacggcctgcgagagcgagggcgagtggaagactgtcggcggcggcgtcggcggcgagagccggccgacgtaagagctgctgccagttgacggacgccgacgatggtcggtcacgaacggcggtcgcatagaggacgacgactgcgacggcccggtcaggtgcgggtgtcctggcccggacatggcgcccaaaggccgcaggaatggcgagggcccaatcgcgctcttagcgctgctctgccaaacgcaatcttcgtccccctggtctagcgggatggcgatctgctactcaagatggtggctttgggatttgggataagcccttgaagagatcctcgtccgggtcggcggcaacgtcgacgtcggccacctggcgcagctcgccacgctggtgatgcaggtgaccgaagcgaggatggttggctgccgtccgaggggctgaacgaacgaggttgagaagtcagatcgaagtttcgagaggtgaaagaaagtcaggggacgcactgggcctcgaatcgctcgcccatcgccgcggaggtggagacttgtcagcgtcgtcgtcgtcgtcctcccacggctcatcgggctcgtcgctctagccatcttcgtcgaaggagtcttcgtcgtcgtcgtcgtcgccgctcgagtctccgggtccgccacgcccgcccttccggccctgtgaggcgaaaactgggagagcgagaaatgagacgcttcagccaggagtcaaagcctgggaaacccagctgctacacagctgacgtccatcggaccctctcttccccgcgcagggctgccgcaagttgccggccagggtgaaacttccgacgaccttcgtccagccgacgagacgcccctgcttgtacgcgcggcggaaggccgggcaggtctcggcatggcggatgatcgaggacttgtgctggaagcccctgtggttgcatatttcgccggcgccgcatttgaagtagccgtcggggtctcacgcgatctcgtagactggtatgaaggaggggtggaaaggaggaagggcgtcaggggtcgcggttggttgccctgacctgcgcgtcgcgtggcctgactgcactcacctccgttctcgagtacgacctgcaacagcggccaatgaattgacaccccatggctgtaaaggtgccggtagttttcaaacgtggtgccgcagtcgccgcagacgctcgacaggtggtgggtgagcttgcccatgaaggcgaatgccggcggccggcgacgttggctcgggccgcttgccgaggagcgcggggaaggcgggcggatgcaggtgccagacggagcgagggtcgaagcagaggcagtcggagcggcggatgctgggcagtagggcggcgtacgagagctgcgagaggaatatagatggagggaagctggcgaacaagacagggagcgatgcctcgaggggctggtcgtcgcgccgcgcgcagcaagccgcccccttttatctcctgtcgccccggccaagcacgacccgctctgcgagaaaaggaagcgtcctgagtctcgctcatgtgccgtctcctccttcctcccagacgatgccgtcagagaatcatggcggagtgtagttgatacagcaaagggttgggctcgggctttgtggctacccgacgccacttttggtcttccgtaagcagtcggcactcgcactcctggcaacgtcgctcaatcgacatcgctgctaaccggccctagctttgatgagatcgatatccgcctgttgagaagacaggatgtacacgggcatggacaagaaacggagcactgaagtcgcacagcgggtcgtcagcctgcgccgcgaggcgacgaccgcagtccacatcgacgacaaggggacgcacttcgtcgcttagacagccggcagcggcttgctcgacttgagcgcaggagacggctcggccgacggagcggccgaaggcggggcgatcagccgcgggtcgggcacgtccgacgtgtcgaggttgagggcgtagtaacgcgcgccctgcagcagtcagcgagtgcagataagtcagctccagtcctgatcgtcttctgcatgcctcgcccggacgacgcacctgcaacgcgagaacgcccgtcagtgcgacggcgctcaaagcatgctcgagcgcaagctcgcgcagcgcgctccggacgtcgtcgtgagccgagaggtatgcgagcccgccgaccgagtcgtttggcaggctcgcgtaggccggaatgatcgagtaggccgggttgatcgaggtgaggtggtggacgatgagggcggagaagaggactgggggcggaaggagcacgggagtcgatcagcactcgcgaccccaacaccgctcgtcgacatgacggatgccagacctcgccgaagcgagcttgacgagcagggcgcctacgcacagagcgaaccgccgtcaaagagccactcgccgccgccgccacgaccgccccagccgaggatgcccatcgcgacccggccgctgagcgcgccgagcgcggcgaggccggcaatgcaccaggcgacaaaaacgtgtcgtggggccgagacgaacgagctgtagtaggtgagcgagctgagaaaggcatctggcgtcggcggcgagatgtaaaggacgtcatggtccgctggcggggacgaggcggggggacaaagggcagggtgagggaagggtcggcacgcttcagtaccaggcaaccagcaagtcggagcgaggagcctgcgcaccgatccagtggacgtaggtcgttcctacaggcgagcagcagagtgtcagggtcagccaatgatcctgggagagagctggggatccaagtcggcttggcggggggcgaggcacgagccagcgaccagccgtctccgcgtcgcgacctgcaggcggtcgactctagcaaaagaacgacgcaccgagcaggaagcccgtagcgcagatgatcatcgtcgtgaagacgcccatcttgagaagggtaggaggaggaaggaagggcggctgggaggaagctcgggggtcgacgtcgggcaggctgtgacgaggcgatctttcgccgaaagccaagagacggagcaactcctccttgtcatcgaccctcgccagcaacatccttctgacagcatcgtcgacagtaaagcgccagagccaggcctaccctaccgtcgcccgctcgactgctcattcggtccagcagtagctcgactcgccagatgtcgttgccatcgcttgccctccgtcggcttcagcccggccagctcgccagcgtcggtcgcgtcctcctgccggcagctcctctggccgggccttcgtcgcctcgatcttctagcagcctacgattgccgccgtccacccccagccgagcgagggcctacgcgacgtcgccctttgccccgtcgtcctcgccagcgcctcaattcccggatccggcctcgtccgaccgcgacggcaaggacgagcccaaggccgaacgtcgcttcggcaacggcatgttcccgtcattcaccaactcgcccgcgctcgacgcggcgctgacgacggtcgtcgggctgtttctcgtgttcgggtcgggcaccgcctacctggcgtggtacaaggtgcggcccgcagctcgtcctggaggcctgaacgtcgactgtgtgctgaccctgacctcctcatctcttgaccgcagttcatcactctccgacggatcgagaaggcctttgagccggtgcggtcagccactctgctagtctgcttgcagctattgctgatcgtccgctcgacggcccccctgcacagggctacgacccggcgctcgacctctcgacgaaccgcacgcgccgatcgcgcctacaccaggcccgcggggtccaccggaaggaagaggaagacgaaggtcacattgtccgcgaggagcaggaggtcgtcgaccggatcgtccgcggcgaggaggtcggcggctactacgtcctgatgggctcgaaggtcggtcggccgtcctctaaccgactgcgccctccagccacacgctgacttcaaccgtctaaagggtaccggcaagggcacgatgctgcttgatgccatgcgggctatcgaggccgacggcgcggccttcgtcgaggcgcacccggacctcgaggtcttccgcctccggttcggaaaggcgctcaactatgacttctttgaggactggcagggcggcctcttctcgcgcgccgacccgcgcgacggcgggccgagtctcgacatcggtttgtccagcatgttaagaagctaggactgacagccactgacacgctgtgcgccttcgaccgacgtcagagcgcgcgtgctccaagctggagaaggtcggcctgcgttatgcgcgcaaacgcggacgtccgctcgtcttgatcttcaacagtgcgatttgcttgttcatcttggatgccaccggcacaggctgatcaggatcggcccgacgacagacatccacctgttcccgaacgacgacgagggtcggaagctcctccatcaactccagcagcgggccgaggcctgggccgaggccggcatcgtcacctgtgtcttctcctcggacgatttctggccgtacgacatgatgcgcaagaatgcgaaccggatgaagatcctctcggtctacgacctgccgcactcgtcggccctgcgtgcgctcgcgctcctccgggaggacgtcgccccgcaagcgcggccgctcgcgcccgaggtcctgtcggaggtcgtcaatctcgtcggcggccggacaagctacctcagtcggtgcgcgcgggcgaaggacccgcttgccgaggcgcgcttcatggtccggagtgagcgcgaatggctcatgtcgcagtgcgtatctgcgcatcgcagcctgcgattggtggggcgctgacaactctgcactctcccctcagaatcggcctgatcccggacgtcgacgacgactgcatggacgagcagaagtggtgctcgtgctcctggtgagtcccgttgcgactcgtccttttgagactgtcgcttacacctcctcctgtctcgcctcggccaggctcctgctccgcgagctggcctcgccgaagacgctcacagagcctgccggtgcccccctcaacacctctgggccaacgacgctcgctcaggcggccgacaaagatgcagagagcgacgaacgccggaccggctacgtcacttacggccaggcccgggtgcttatgacgcgcgccgactttatcatgccgctcgaccacctcaacatcatctcggtcgacgtacgcccttcgtctcaggcctcgaatcgcgcaagtcgatcggttgctaaccccggacgacacccctgatcttgccagatcaaccatcacgtccggccagactcgcacgtcacgctcaacgcgatccggtcgattgtctccgaggagggtgcgtcctcctagctcggtcttattacgcccgggctacctcgcgccatacaacgcgccacagtgcgctgacgtccgctgcccttgctgcccatttgacccttgcaaggcttcgacgacctgctcgacaacgtccgcgatcgcatcgacgagatcgagtctctccaccgaacccgcgagaacacggtcaaggaacctgtccgcgtgcgtcccctcttgaccgggcgcctcatagaagagcgggcctgcatttcatgatgacagagcaactgacatctaccgtgcattccgtcctgcccgtcgcccaggtccggccctggcggaaaggccggcagcgcggcctcgagatcgtcggcctcggaggcgacggcgacggagacgacgatgcgggcggcgccggcggtgatcagagctttggctggtggccgtttgggagccgttcgggcgcggctggcgaggagccggatgaggtggctgaagagggcgctgggcggatctgatagagcccgaaagaggcggccaagatcgtggcctggctcgggggcgcgcctgatagacatgccgctaagagactcgcggcgaggccgagggcagaggcccgaggtcttgctgggcagggtttggctaatgccagaaggagtgtgtttcgcgggtgccctgcgacgggcgacgacggcgttcggccatggtggtgtattgaaagcgacttgcgagagtcgcccacggctgccctccgaaagccggctcagacgaggatgactgccagaaggaggaggcagaggatgacgatgaggatggctatgcaccagccagagcctttctctgctcgggataaggccgacgacagagcagcgcgaagtcaaaggagacgtcgggcggtcagtctgcgtcatctacctgcgcgctcgaagccgaccgagggtcagagagggggcgcggcgcaccttcggcccggttgagaaaatgcttgatctgggccgtcgcccgcgagagcttctgctcggtcgagctgacagcgatatcgagcgagtcgagcatcctggcaggcagacagtcgagcggtcagcgctgagtgtgacagccgccaacggcctttcgaggacgcactcattctgctcgttgacctcctggcccatcagtctcgcctggccgccgatcgtcccgagcgtgccctcgagcgaagcgagcgtctgatcctgccggtcgagcaacgcttgctgctgctcgcgctcccagccttcgggcccatcgcgtccgtcgtcgttgtctttgccgtcttcgtcgaaggaggaagggcgagcagaggagcgtgtgagcgggtcggaggaggcttggccgagctcgacatcccggtagggcctcggcttcaggaggggtgaggggctcgtcagcagttgggagggcaagaggacgacgtcagggccgccgcgtaccttgctgccgaaggctgcgggcggaggacgtgtgcgccgggggtcagcaacaacagcttcacgcgagcaagcgtcagggacgtacaatcacgagccatctctgaccacctgaacgagcgacgggaagtgagttgcgggtcgtcgagagatggtcggacgcgtgcgctccgggccatgcatgcacttgctcgggatacaagccccgatctgggacaaaggcccagactccgaccgccagaaagtggaccagtggaggggccacgaagtgagctcgacaacgacgacgacgacatcgacgacaacgcaacgacccacaacgataagagagccaaagaggacagccagcagtcgaccgcagccaagcaccagtcacgtctcccctagtctcgccggcatcacctcgcggcgcttgtgaacaacgcgccggcagctcgctccgcagccctccctctgatgctcacccggcggtgctgtccgtcaacggcacgctggtcggcgctcggcgctcgcgaggccggaccgcttgccagcagcagtagtctcctccggcagcagcgccggtcgtacgagaccctgacgacggccgagatctttgacacgcggcatcccgacgtccggcccggctcgtcggcaggcctccttcagccggccgacctcgcaaggcggaaccggctcgcgccgtcgagctcgaacccgctcgcaacgtacatcgagcccgagtcggacgacccacttcgccgagccgagcggcggagtccggctgccgtctttggcgcgaggcgcatgccgaggatcgccattccaagtgagctcgagaacaagctcgagcgtctcgttggccgtgcgtaccttgcttctgcttctctccacttgtcgcctgagccttcgctcgcaggcatcacatcggcattttagaggactgctcggcgtccctgactggctcggcttctctccactgcgggacgagaggggagctgggcaggtagatgccagggccccgagctggccgaccaagctgatcaaccggcgcaggtcttctgacgctttgagaggccgagacgcctcacccgcaatggcaacggcaaaaagaaacaagcctgcgaagactggagactacacgaattgaacgcgtgaccttatacatgctaagcatacgctctaccaactgagctaaatcccctacacaagttgttgcttgtcgtttggcaatttgcggtgtgtatcctaccgtacatgcagagaaggagagagggagaagggaggtggagaatcaatgaaatatacaaaagatcgcttgatgcatgcatcgtcttgtacgagtaagccgtgcgcgagctgaggacgccctgtacatggacaagtcgaagaaggagactcgctgcgcggcccgggacgtccctgccgctgctgcctcgcgcgcgcgtgcaggtgctagttagggttccgatcgcccgccctgactgctggtcgcgcgcaggccgcccgcgcccgccctccctcctgtccttacactcttaaccctcgcttccccttccattagccttcacgcctagccatggatccggcccttgacgcagatctcatccacgactcggagcctgaacgtgaagccgagcgggttcgcaagcgggcgcgacggacagccaggagggagtcccgacgacaggccgccgacgacagcacggccggcagcacgtcgaccctgacgagcgggctcgacgactcggacgagatccaagagatcggctcgagctttcgcacgaggtcccagcaagggacgactagcgcctactttgggaagggcaaggccaagagtgcgtcgctccagttgctctgcgcttggcctcctcgtcgagcagcccctgacgaacccctcctgtcgccttcccccagcgaactcggtcgatcctgctcctacggcaactcgtccattgatctcccgcgccagctcatcttcctcggccgtcttccgcgcgccgtgtatccccaaggcagacctagcggcggccgaggacttcatttacgctcatgcgccgtggtcgtcgccaccgatgccggcacccgtcaacgcccgcgagccgagcttcgacgaccctttcggcgagcctatcgacgcggctccgccaaatccatttgacaacgcagagctccagcggatcaaggagtgtccgctctgcaaagaggactggaatcagttgcgcaagctgtcgaagaccaagtgggtgcgtccgagcgcagctccctaccgctcgtccgaccccggtcgcacctcggctgatagtgaacatcttcgcctgcgtttgcagagccacatgctcgcttgcaagccgtcgacatctgtttcgtccgtcgtccaggctgtccgcgatcggcttaacgagaagcgtccgggcttctcgcgggcgtcatcgacggcgtcgaggtacaagcgcacgacgtctgtcagcctgagcgaggtttccgactcgagccgccgcatcctgggccgcaagccagaagtagtcgagctctccgagagcgacgatgacgactcggaccgggcaccgcgtcggtcgattacaactccggcaaccggccggtcggccgaagcacccgagtcctgctcgcccttccgctcgccttcgccggcggcctcgggccaacatgcctcctttgacgggcaacagctctcgcctccgccgcgcctcgacctatctcgtttcgcccacgagggtagcgccggaagctcgtccaaggcgcccacgtcggccaacctgtctcgcaagccgtcttctataaagaagctgccggtcaaggtgcccgacgcgccggtccagccagacatcctgcgcaagctcaagcaatgcatcctttgcggcgaggactggaccacgaagtcgcgcatcggccggatgaaatgggtgcgtccttcgctgcttctcgccaatcccctgcaacggtgcatgctgaccattcgctttacacgctctcaggaccatacgttcaagtgctcgcgagccctgcccgagcccctctcacttttgcgcctcggcgagcttatggaggaggctgtcatgccgcctcctccgacgctgctcgactcagtcgtgccccaccgcaagaagccggcgcgcaagggcagcgccgtcgagtcgagcatttttgttgccggctccgagctcggtcgcgaggcgatcatggaccgggtcggacaggtgctcggcgaactgatcgccggcccctcgaacgctgccgacgacgaaatgcagccaccgccctttccttcgacgcagaccttttcgacgtccggcctcggcgctcgatttggcgtcggtcgtggctcgcgagttgactcttggaccggcggtcccgcgaccgatcaagcgagcgcgcctctctcgcctccgcttggcaacggcgcgtcagcgcagacagtgcgtttcctcaccgccttgcttgtctgaaccccagaggaccggcctgacaatcctgaagcccctcgcttccgtcgctacttcccttcgcctgtcccgccattcttcctctccatcctccgacgactcgatcgtgtttctcagcgaaagcgcaagctcggcccttccacctcggccgagaacctggtcgcccctcttccagccgagccagtcggcggtcagcggccgtccaagctcgcggctcggctcggcggcggcgtcatccgtggcgggcgcggcctctttgacctcgccggcgcataatgatcggagctctggcgaccctcttgctcctcctttcccttcagcctcatccctctccactcacagcttactcgccggcacaataccctgtgccgggccactttacgaccttaccaaagacgtccttcccgccaacgacatcaacgaccgttccttcacttccctctcgtcctatgcacaacgctcctcctcgtcggaggtactactctccgagcggccctcgcgaggcggtcgcctctcgaccaagctagctcgttcgccatcgccagagtggagcgatgacggcgtcctccactgggagggcgacaccggctatgccgtcgacgttttgatgtcgggcgacgagagcatcgaaggagccgagctcgacgctgccgctgccgttgcaccaatgtcggcgcctgcgctccactcgacgccaagaccaaaaggcaaaggccgggcgcctccatctatgcccgaatacgacagcatgaccatcaagcaacttcaggtccgttcgcttctggagttatcactcggcgtcggctgattcgctcgacctgtcgccgaccttcagaccaaggtcaagtcctttgggttcaagccgagcgctcagcacgcccaactcgtccgcctctgcgccgacatctggcgcaccatgcatcccgaccgatcatcgcctccggttgccgctccatcgccgaccaaggatgtcggccgcacacctcgcgccaaggcgattcgcaggaagggctcgaaaacggcgacggcccggtcaccttcgcccatcgacgtgccgaccgttgcaagtgagaccggagccgcaccctggggcgagctcggcgaccggttccgccagatgattctcgacgacgaagaagtctggcttcggatcctgcgctacaaggtgcggctgatggcgaccaagacactcacgtcctcaaagcgctcggctgactatcctctggcctccctgcttcccttccagcctctgtcgtttgacgagctcgtttcgatgggccaccaagccggcatcaagaccaaaggctggcgcaacacgctcaaactctggcttgacgatcaggtgagagctctcccaccagcttctctcaccaggatcgagtctgacccaagcgccgccgccttgtcagagcattactttctacaacgaggagcagtccggctgtcggcagcgctatccttgaaacgccgcttgccatgggctgctatcccatgacgctttcgacgaagccacttgtgaccttgccgctagaccgcgggtcgcggtattcaggcgccaaggctctctctccccgcctcgcctcgcgaacccaaatcggtgttcgtctcgtgggccgtaaggggtctggcaagacagcgtctggccgtcagcagtcgctatgccgtcgcttgccgaacaagtcgggctcagaggctcgcacgcttgcaagatctcctcgtgtcctgccctgccgtctctgcacctctgtcgtctgcaaacggctctgctcgtccactgatacgccgtcattttgccgcccctatgctcccttttgtttttctcggccacttatcgctcgctgcggggctccagaaccggcggcgcagacggagctgttgcttgtcgggtcgcccgtcgctcctcgaacaaccttcaccctctccttcctctcgcagcaccccctgcgaccctccagcctctaccacaagccctcaattcgccatcatgggcgtgacatccgacgaggataggctgagggagctcggcgttgatcagaagttgacgcgaggttggggcctcctcgtcagtaccagcgcctccatccagccctcctctcatccgatggaattctcactgacgttgcatatcacaaacagcaaaattttggcgtctcattcagcattatcagcgtagttacaggctcgtcccagtcctgaccttatcccggcctttctggggatcgatcagaggccgggggggcgagttatcgttgcgcaacgggttgatggagggctaaccttcggcctgcccgtgacttccacaggcggcacaaccctgttctcgcttggcctggcgaccggcggaccggcggtacgtccctctctctcctcgccctgggccatcttactgacctcgcatgacggcgcatctcggccaggtcatggtctttggtgcgtcgcgaccaaacataacgctcttttgagaggccgaggccgacgcctgataccgaccctctctcttgcctggcagcttggatcgtcgtcatcttcttcacatccttcgtcgcgctcggcatggctgagattgtcagcgcgattccgagcgccggaggtccctattactggagcgctctcatcgctccccggcggtcatcggccttctggtcctgggtgacgggctggtccaactttggtacgggccggagctcccgctctcccttgctcagagccgtcgctgacctgcacctcgtttgctttgagcgcctccagtcgggcaggtacgttcagtctcccatgacgctgctttcgacctgttgactgactttagctgtccttcccaccattacacctttgcctgcaggttgcggtcacgaccggtgcgttcgccgccgccatgtttccaaaccgcaagctgactgcctgcatctcctctaggcatcagctttggcttggctcagctgatttctgcggcggcggccatcgacggctacgaagctacgcccgccaagacgatcggcatctacgccggcatcatggtctcgcacggtctggtgcgtatctgctcgcgctgaaggccgccgacgggagacgcgccgctcctgtagcagctggagcagtcctcgaggtaccgaggccaggaggcgaaggcaggtggacgcccgcctggagctcgctgacctcctctccgcttttcgtcaggtcaacaccttcgcttcgagacaactcaagtatctgaacaacgccagcatcgccttccactctctgggcgtcttcgccatcagcgttgcgatcctggcgaaggcgccgacgcaccagagcgccaaggacatattcttgaagttcaacgactcgaccggcgttgacggcgcggccggctggtctgagcgggcgtcgcccgcctatacggccatcatcggctgtctcatggctcaatacacgattacaggtctgttctctccatttctctctctgtcttgtagtgatgttgactcgttcacgtcgactgccttgcggtcgttccaggatttgatgcatcggcgcacctggctgaggagacggccaacgcctcccggtcggctcctttgggcgtgctcatctcggtcggcgccagcggtgtcgtgcgtccccttagcgtcggcctgttctagcagctctctcctgactccaccccttgcgtcccggtcccctgcccttccgctactgcagtttggcttcttctacatcgtctcccttctcttcagcatgcagagcctcgaggagaccctcgagagcccgatcggccagccagtattcaccatcatcatctccatcttcggcccgtcacaagccaagggacttatcgtcatcatcctcatctgcgtctggttcgccggcttgttttcgctcacgagcaacaggttcgtcctgtcggtctttgcccagacttggctttgtctgaccaacagcatcccctttctttgaaccgtagtcggatgtactacaggtgcgtcgagtcaacgcggcgaggcctggttgtcacaaagggcagatcctgatgaattgcctcctgccttgcgacagttacgctcgcgaccgagctcttcccggtttcttcgacgatgtcagcaagagatgggagtgcccgatccgcacgagtgggtcccacttgaaattgacgtaccgacctctcatagctgacgctttggctggcgcagtttggctcggcgtcttcctgtcgttctgcctcgctcttccctcgctcggcagtcttgtcgccttctcggccgccacctcgatcgcgactattggtccgttgcgttgcgtctttccttcctgcgaacgaagcagctgacgtcagagctcctaccttcgctcggaggactctaggcctgtacatctcctacgtcgtgcccatcaccctgacgctcatctaccacgaagaattcaagaagatccgcgggcccttcaaccttggtcgcttttcccgcgtcaacgccgtcatcgcgacgacgtgggtctgctttatctcgatcgtcttctgcatgccgacgctcgcaccagtcggccgggagactctcaagtgcgtcgctctactcactgcgctaccgtttccttcccgagctgacccgagggcccatgaaaagctacacacctgtcgccgtcggtatcgtctttatcctcgtcctcgccgtctggttcctctcggcacgcaagtggtacgcgggccctcttccgaatctcatcgaggtcggggcgatcgatccgagcatcctcgccaaggagcgcgacgtctcaggcgagaagctcaagcacgagcatgtcgccgtcaaagtcgtttgaacgctttgcccgcgtcttagcatctcctctccatcatctccccgaacctcgttgtagatcgtcccggactgtaatccgctgctctcgactctcctcgccgtccagcggcgcaatcgatgcctttcccgcagcacgtgtcatctagcggtcactgcggctcagcgctcctcccgaaggagcgtgcgatcgcctgcatcgcctcgagcagcgccttgcccatcccatcagagccctcggtgaccggcacgatcttgagccccttgccgccttggctgatcgggtcagaccactcctttctgggagtcgcgttctcgacacgctcggcggccgagattggatcaaaatcggacgatgtaggggtcaggtcagaaaagatcgcggcatgcgcgaggacatatgccgggtagacgatctggtcctgcaagagcgcggtcagaggtgagggtgatcagaatgtcagcgtggcaatcgtttgcgcgattgattgacagaggccgagacgcacaaagtagttcggagggtcgcgccaaatgtcgccggctgcagagtgcgtttgagcttggacggcgtcagcgcaagcaagtcgccgagcggcaagccatacagaagacgggcctcacactgcgttacgtactcgttccgagtctctcgtcgcctcttgagcgtggcgtaagggacgcgcagaaagatgcggacgtcgagctgggcgagaacctcctgcacggatggaaggagagaagcgatgcgtcagcgtagccccgaaagccctgccgtcgacgggaaccccttcggtcgacgcacaggattgtagaagttgagaaagccgtccaagatcccaaattggaggtcctcgtcgcgatcgctggccgcctgctcaaccttggcgatcagtcgtcgagcctcccggtcgacctcgtccgggacgggcacgccgtcgaggacgttgagatggtcgtgcgtcaggtgggcttcgggcagactgccgtgctgcttgaagtaggcgagcgacgagcgcagcagtggccagtcgatcgcggtcgcaggcgtgtcccagtcctggagatctgggttctgcgacgagtatgggatctggtcctgcggctgagggcgcagggtatcgggcgttcggatccgggggtcagccctgtatcgtcgacgggaagcagcgctctccaagacgcaccggcgcaaagtcgtcgagatggatgatggtcgagttcgtcagcagccgacggagatgttttgagaccgtcgtcttgccagagttggacgctccgctgcagaaaaggagaagaggaagcgtcgtccgatcagccctaggaccaaggagatcgggccggaaggcaagtcgtcgagccgaccgaggcgcacccgacaccgatcaatgcgatccgcttcttgcgtagaggggtattgctgctgctgctgctgctgccgttgcctcgagttgccatcgtgaagatcatgtcgtcagttgtggtcgaaggcaaggcggccgacgtcgtccaagctcgccctcgtttcggcgcaggccggccggccggccgcgcacgatgctcgcacagacacgtcaggccgacgagaagctcgactctttctttgcagcaagctcctctgccgacgtcgactcttgatcctgctatcctcgagcttgcctatcggtccgccgcccgacctccccgcacgcgcgtcatggagagggacggacgagcgctccgagctcgggttaccgtagccgccggacaaagtctgccgctgctttgagcgttgtcgggcagaaggccgacctcgctcctgtccgcctcgacagtccatcctcaaagtgagcttgatcgcccggccctcacctctggaggagcatcgactgactgcccgttaccgggtggcccttgaaccgccagcggctcctcctcttcctactcgctccagccacaagcgaccccgcgcagcagccatgctcgccgcctcctcaagcctacacccagcgacgagggcgattcacgagggcaatcgtccttgtccgacgacaggggctatcctacagcctctgattatgtcaacaaccttcgagcaaagacgaccgggctcggctcacagtgcgttgcggtcccaccgacgttctgcgctctgcgttgctctctctgaggctgaagcgtcctgtcccccctgccctcccctccagctgccggctacacctatggacgcgacgggaacccaaatcgtgaggcattggaagcagtcctggcgtcgctcgagcatggccacgcagcgtacgccgtctcgtccggtacggcggcgacgagcctcgtttgccaggccattgggccgaacgctcactgcctcgcgatccagggcatctactctggtgcgtgcggcgtatcatttaattggggttgagcagactgacagattgctttttgtcaggtaccgaggagtatctccttcgcgtggctggccgggggcaaggctggacgacgaccttctgcgccttcgactcggcctctgacgatgcagtctttaacgccatccgtccagaaacgaaggtacgtcttgcccagaactcaggattacgagctgctgctgataatcttgcgcgacaatctcaggtgatctggctcgaggggtgcgggaccaacccgctgctcgcggtcgccgacgtcgccaacgtctcgcgcatcgctcgctcgcatccggcccggccgctcgtcgtcgtcgacagcaccttctcttcaccctatttcagcaacccgatcttgcgcggagcagacctcgtcatccactcgacgacaaagtttatcggcggccacactggtgtgatcgcccgaacccattcgttctgtatagctcgcttattgatcagagactgtcctcccagacgttattggcggcgccgtcatcgtccgtgagggtctccctcagctcgaggaggacctgcgctggcttcagtccaacctcggcgcaaccccgtcggccttcgactgcttcctgctgcagcgatcgataaagacgctcgcgatccgctgcctccagcatgggctctcggccctgcgcatcgcagcgcatctcgaggcgcacccgctcgtcgaaagcgtgctctaccctggcctcaagatgcattcgcaccaccagcgggccaaagactcactcgcggccggcgtctggcgcgacctcaggagccgcaccggttgggagcaggacggcgtgccctatagcggcatgctgagtttcacgatcaaggggcctgactctgccggtgcgtcttcggtgcttgaggtagttgtcctcgctggcagctgacaatcaatccacaaactttgcagccgagacgttcatccaagcgagcaagttcttcacgctcgccgagtcactcggcggcgtcgagtcgctcgcaaaggtgccgtggctcatgtcgacgtcgcctctgtcggacgcagagcggcgcaagacgggcttgtcgcctgcgctcgtccggatgagcgtcggcctcgaggacgttgaggatctcctggccgacattgaccaggcgctcgaagcggcggtgcagcccgccgcagtgtgatctgatgctcgtcgaaaggtaagacggcggtacggcattttgctcgttaagcgaactcctcagatccttcatgcctctatcgtctcaggcgcaggctgacagagaagactcgaggctgaaggcgtcgagggcgtgagaacctttgttcaccttcgtgcttcccgcgtcgccacgcctggaggtgcttgagagctagctcctcctcgacctcaacttcaatctcaagcagcccctcgtcgagctttctcctgctggcaggccgacctgtctctcatcctctcgagcttctgaccgctgagtcaactgcggtccagcgctccttccgaggctcagcaaagccgcagcacgccccctcccccctcccgtccctctcgtccgctctctcagccgctcgacggtcgcgcgatgggcggccggaagtctaagcacaacaaatggctggcgcagcggaaaggctcaaccgccatcaaagcctttgacctcaggctgctgaaccggccaccgggtccgcagaccctgccgtacgatctcaacctgtgcgtcgccttggacgcgggggctggctagaggccgcgaggcccaacatgaaggctgagacccccttcccaccgcagagagacgctcgaatactttgagctcgacgggcggaaccggaggaagtacaataagccgtcacccatcgtctttaagatcaacaccgagggcgagtacctgttcagcgaggtgacagacgagggggctgaagccttccggaagaggaacgcgaaattgctcaaggacggcagcatcaacccgcacagggtggcaggcgaggacgacgagacggcagaggatgacgacgagagcggcgagcagacgactggcgacggctcgacctcgcgcgacgactcgaccacgccctcggagctcgcggccgctgcggagccgatggtgcgtcgaccgccccctcccccttcgacttctccctcccgaccatcacgtcgttcgcccgacacctgcctgacagacgagatgtcgacctcgctccctcaggacgtcgacccgaccacgttcgtcagctcgagtgcgacagcccgcggagcaacgagctcgtcgagtgcgtctcgccatcatcctcaacgtgtttccccctgtcgagctccagccggccgtgctaacctgccgacgcatttcagctcctcttcaaaccagcactagccttcctgctgcgacctcagcagctcccgtgttcgacccattcggtggaggagagagcggcagcgacctctcctctctcgacgacagcgagtcgcacgacgacatgcagtcgtcccctgtcaagccagtctcgccaccgccggtcttcgcgaagccgcgtggtgcggcatcagtctcatcaccactcccacgcctatctggtgctcaacccgtgccggccgttgcgaccggctcgggtcgctcaacctcgggtcgtgagcgttcgccgtcatactcctctgggtcggaggagagcgaggacaaccggcggcctacaacaaagggctctcgcgtgccgtccgatgccgaggacttcaagccccagcctgatgcgtcaacgaccacgaaggtgccgctcaaattccctccggcgtccaagaaggcaacggccaccgacaagccaagcaagacaagtgagaaggctcggccgcgcccgagcagcggtgcgaaagtccaggacaaggcccggcccggtgaccggcccgaggtaggatcctcgaagcgtgtcaaccggacgatcaaaacgaccgcccgcccgtccctcccgctgccgccaaaggaggggccgtcgccggctgccgcatcttcgtcgtccaagctcggcaagggccgggagggcagtctggctgaaggcgagggctcgggctcaaccaatcctaagatcatcctcaagccggctggcgtatctgctgcccaggacaccgccgcctcctcgcacaaggagtcgccgtccggcaagactaagtcaaaggatcccgctcggccgccctcgtcctccgccgactcgccaaagccgacaaagagccttaagtcggcagcagccgttctcgcagcagccggggatgctcaccgaccaagtgtcaagagcaagctctcggcgtccatatccgcggctgcgtcggtcgccgaaccgacggctagcagtcttgctcccgagaccgctcggctaccgtctgtccccgccaagcggtcgcgggcgtcgtcgcctgggccagcagcggacggtgcgccggctccgaaatccgacctcgacgacgtgcctgcacccaccaagaagcgctcgcgaccgtcgatctcctcgaagacgtcctccgccgacgccaatgatgccaaccctccgggcgcaccctcatccgcactggtcgatcaggttaaggcgtcgagcaaggaggccaagatggccgccttgccgacgccggcagccacgtctactgcctcggtgcctgctgttgccgccgactcaggcacacccggtccgtcgaaggccgcaaccagcggcaaggcgacgccgtctgccaagtcgtcgtcttcatctgccaagcctgcgctgaccacctcggccagcccggcgtcggcgtcagccgcacatgcaaagcgcaagcccgagacgctgctcaagaaggtcgtcaccggagggtcgtccggcccatcgacgccgacgacgggcaagatgccgaagtccagcttgacttcgaccagtacgggctccaaggactacgtcgcacagctgctcggtgccacagtcgatccgaccgcggtaagtctctcgcccgctgggcttggagagaccgttgtctgaccttcaccgctttgctcacccgtttcagtctacgccatcgcaaccgagaacggcatcaacgatcagggtgcagctctccgccaaagagcagtgcgtcggcatcgcctccctccgcgtgcgctgcgaagctcgactgacctctgtttcacactgctcttccgccggcagggcggagctcgagcagatgcgcaaagagcacgaggccgagatggccgactttctcgctctgtctggcatggtaagcctcccgcctttctcagacgtgccttgctgcaggacaccgggctgacgctcgacccccatttgctcgtccaaagtctcggccgctcgacatggagcaccaaggccacgtcattcgtgcgcgccaggtgagtttgctcctgttggaatatctgctcatggcatcttgcctcggcggcaggcagctgacgatgttcgctcaactctgctagaacgccatgcgccgcgactttgacaagcacgacgacgcttccaacgcgtacgagaaggcgctccagaagttccgtcacagcggcggcgggcagacctacgagcccagccggccgcatccgggcaacccaccgccgcagtggacgaagcacgtcccaaccttcccgcatgagacgggctcgctttgcggccgattggtcgcctgcatggacgatcggcgcgaggaatccgagagcggccggctcgccttcccgctaaacaaagccgaagccgccaacggcgactttgtctgggttggagagtgcgtccccgtcattctgctctctcgctcgtgcgctcggcttgctgatcaggccgcttctgctcgcaggatggagggcaagtgggacgacaccgctgccgtcgcggcgtacctcgccgattcgacctacttcacgccggctcagtaggatgcttgcgcaacgccgctcgcccgtccccgatccgctgcccgccggcacgcgtgctttctctcgccgcgcgttctcacgcttccaacttcctccttccttgcccttcccacttactcacgacctcatccgacctctgtcgacacttcatgcccttcacaagacgagacacggcctcgagcatgcgtcattgaccaggcgaccgacacgaagctttgaacgagtcgccgagagctcaacgaactgctgagcgcgctccgggccgagcaggtccgcgagggcgagcgcctcggcgagctctgcgccttctagtcgggcgtcctgtcgttcatgcgcaacgtgcaggcctgatgagatgatgccccccatcggcatccttcgcgacccgactctggcaatgagcaccggtaccgcgatggggtgcgaagaagacggcatgtgcgagatgaaagggcatgaggatcgagacagagtgcagggactgcagggctgcaacagcacaggatcgaggaggaatgaagcggaaaggcatcgtgagtcgtgagagaggaaagagagaaagcaggacgcatcaaaggtgcgcgccgctcaggaaaaaaaaatggctatgagtgcctccgggctggcgtgcgagaagagatagtgccgggcgatggtgacggttgcttgcagggccgtcggcgactccgcctgcagggcgagccaggtgcgcgagtccatggcgaagccgtgcttcttcagacgtaagacgagcgccattcatgccttggcttaaagcgtaccgtcaggtgtcgcctcgttagcagcgaaggtagtcgagccttcaggactcattcagtcaacctcgcgctcagatggtgaggagcagggtagtctcaccagaaacttcgcgaagaggtcctgcgttgccgacatcttcaacaacgtttcttgatgatccccttcgccttcatcagaccgccggggctgagccgtgcgagctgagctcttggagagatgccgtcggagggacgaacagcgccagcagggcatggatcggtcgacgcctcgctgctgctgcgcctctcttcttcgccgccgcgctgcagcagcgaaagggtttgatgcagctcgagctcgtcctcccttcgacctcaccaccatcgcctgcctcccccgactcgcctgataacagcaagcccgactccgacatcacgtctcctggctgcacccttgagaaaagagcctccagcaagccagacgcccgccgctcgtaacggagcccgcagccctcgtcctccaccgcgcctgccctaagtcgagctcagaccccgtcatcctctcgcgccctccccctcccgccgccggaccagctcgtcacgctcccaggcgcgaccctgatcgacggccggtaggatgaaaatcagaaagacggccaagaaggtcgctcagccggttagtcctttgcttatgggccggcggcagagggaggagctggtggcgacacctccagcgccgccgcctcgagcttgccgctcatctccttcgtcatgtcggagctggctagctcttgctgcccttcgtgccgggcactcgcgaacggtcctcgctgaatctagttggtcgaattgtgtcctgccctgcagcttcccgaggtctcggccctcatcgagcgcatcctcgcttgcagcgacgacgacatcccgaccatcctgcagacggtgcctgactggccctggccacggggcgacctccactcttggatcaaggtcctcaaccgcttcgacggcgtgctcgagcaggtcgtcaccgagtacaaccttaagcacctccaggtcaacgactttaccccgcggacgcggacgaccgtgctcgagatcctgcgcttcgagaagctcctgctcgagcggtgcacgagccgcaaggtctttgccagctacgatgtgcgtcctctctcctcttccgatatgtccgcctcgcgccaccctgctgactagccgtcgtctctcgcccgacagcatctcgcagacctcctgtcgacccaggacgtcgacatcctggtcgcgacgctccggctcctgctgcggccagcccagcagtaccagacgacggcccactcgcccgacctcgctcccaactcgctcatcgtcaagcgccttctctcgctcgcacacggctggggtccggcccgtgaggctggctttgacctcgcccgacttgcgagcgacacaccgccagccgagggcgaggatgacgagccgccggtcgagctgggcgaggttgtcttccagttctaccgccggctgccgcccgtctctgccgagcggcccgactcgactgccactatttctgagacggcggcccagtcgacgcccgacacccccacgcagggcccgtcagaagccggagtgagcgcgcagacgccgacgctcgccggaagctcggcgtcttcccaccagacgacgacgtcgagcagcttccagccgccagcgacttttggcggcgtctcggctcccgtcgcgagcagcttaaacctctcgtccgggacgaacgctgacggcacgtttgcgacgcccgtccggccaaagcccaagtcggtcgcgagcctccagggcctgccgccgttcaagacgccgaccgccgctggcagctcgccttctggcgcgagcggttcgggtccgtcgtcgtcgacggtcgagggcctgacgaccgtcgtcctcggcaacgtcaaccaaggaccttaccagggcaagtctgcgatggctgtcctggccgacgtcgtcgagacgtacgacatccccgaaaaggagcgcttcgagctgcttaatctggtccggatcgccaagggtctgcgcgaccggccgacgcggcgagcgctcgtctgggttcggtgtctcgccgtcgcgacgtactgccaccttgtgcccgagtcggtcgcccagaccgacctcttcctttacgagcccgacattgtccagcacattgcccagctcgtgcacgtcgacgtcggcgtctcgtttgatatccaggcggctgcaatctttgcgctcgacgccctctctcgctaccgctcgcgcatcgccgaggtcatcagcgccgtcaacgcgagcgccaaccacggcgtcctaatgagcctcttccgcaacatgacggtcaagctcgccgaagagtcggccgacccgccggccgactttgtcgacggcctcgcctcgatcatcacctacctgatcaactcgccggcttattcaaacatgattgtcgggtcgggcatcgtcccgctgctcgtccaaatccttcagatcgagctgccctcgcgcctaccgttcgtcgtcaaggcgatcaacctgatcgaccacgtcgtctactcaaactcgaacggcttcaacctcttctgcaacgccggcgggctcgaggcactcacgcgcaagatccagacgacgaccgaggactgcatcgccaaccactcggccccggccgagagcggcgagacgatagccgacgtcgaccgcgatggcgcctttggccggctgccgttcaagaagtacacggcgctgaaatcgctcctgcgctccatcagccggatgatgcagagctcgggcacggccgacggccttcgcaacctgatcgactctaccttgccggcaaccgtcaaggagattatcgtccaccgccggacctttggtcccgtcctcttcgcgacctgtgcgtcttgaccctcggatctactcagatccggctgcggatgttatttctgacactgtcctctgccacatccccccctttatagccttgagcgtgatggcgacgttcgttcacaacgagccgacctcgctcaccgtcctccaggaggtgggtctgcccgaggccttctacaatgctgtcaacgacgatatcgaggcctcgatcgaggtcctctacgccgtcccgaacgtcatcggcgccctctgcctcaaccaggccggcctcgaccagcttgcggcccggcaggggacgattgtccccaagatggtcagcgtcctcgtctcagaccggcaccgcaaggtgctcgaggagaaggagcatgcgacacagctcggagcctacgtcgacgagctcatccgccaccagccgagcctcaaggaaccggtcctcaaggccgtgcttgatgttcttgcccggatcaaggagctcggccggaccgagtgctctgacgacgagaccgtctaccacatcctgcccgtgacccggccggctagcgctgcgtctgccgtcgagcaatcgacgccgatggacgttgtcggtgatggcgctgagtcgtccgtcgccgccgcatctgcgtcagctgcgccggtcatctcgaatcacacgccggctgtcaccgctccggccaaagctgacggcgagggttacagcgacaaccgggtcgtcctctccatcggcgtcaccgcgcgcttcctcgagggcctcttccacaaccacacgcactgcaaggagtttgtcaagtctggcgggctcgagcgcctgctcgacttttacgcccttccttgtctgccgtacgactttgcgggcagcgcggcggccgactcgctctttgcgctcttccgcgccgtgagcgacgtcaacccgaatgccgtcctgacggcgctgctcaagcctgtccgccaatcgctcgacgagacgcgcgacctgtgggacacgatgcagccgacatccaaactctctccgctgaccgacctcgaggccgggcctgagctcgaggcggccaacgtcacgttccgccggcttatctgcctccacggtcgggtcgcgcttctcgccgacttgtatcgcggcgtcggcttcagtcactccaaggtcgcgaccggttttcttcagatcctcaatacacccgaagagacgcaggtgctgctcgacctcggtcggctccaccgggcgtgcgtctgggagaacattctgatcaagtcggccatcccagaggctgtcgtctcgatccacggcggcaccaagggcggcggaaccgagatcgcccgtggccagacgcagacggtcgccggcgtgccagaagacgttctcgaggacatcaatgctggcctcttcatcgccggtgacgacaagaaggatggctcggctaaagtgggcgaagcagccgccaagtcaactgacgctgcggctgggccctcggccgagcctgtcaagacgcggaatggcaaggccttcaagtacctcatcagccagctgccggcctcgctcacgcccttcttccagggtgcgtctggccgctgcgcgtcctccgatctcatcattctttgctgacctaccgagacgcctgcccatcactcttttgcagccgtcctcaagttcctcatgttcaagcgtggcaatgacgctgcccaccgcaagcaggctcacaaggcggccgacacgctcgcgagcatgatgctcggccactttgagtgggctcagacgcgtgcgtaacccgctttgcccgctccctcccccgcgagttctagcgctgacctctacctgctcatgcagcggaaccagcgctcgaccccgtctcaaagtacgcgtacggcacgctcatcatcggctttacctcggtcctcctgtttgacggtgcggccattccaggcaccgccttgacccccatccggccttgcccgcggctgacactctctctttttctgtgccgcagagcgtccgatgtcgcaaggctcactccagatgatgctgcttactgctttcgctcaccggggcggtatcgacgccatcgtccggacggcgtccaactttagcgccgcttttgacgagctcgatccgacggcaaccacggccaagctcgagcaagttcacgtctttagcggcctcaaagtcgccctcggcttgctccagtcgctcgtctcaacgcgcgtcatctttgactcgcctcagacggctcagctgacgtcgcgagacaagccaacggcgtccgaagactactttgatccgcaccagttccttgtccggctccggcttgcgatcctgccgtttgtgcggagcatctggcggtcgagttggctgctcaatgcacccgtcgccgtcgcccgctcggtcatccacacggtcctctcgattatggacagcgagcccgagatcaagccggcggtgtcggctgcgccggcccacatctctgcttcacaagccgtgcccggcgtccccgtcccgcgcccgccgccaccacccgaccgtatccagcagctggtggacatgggcttcagcgcccacgctgcgaccgaggctctccgacgctgccacaacaatacgagcttcgcggccgagttcctcttgactcaccctggcgcatttccggccccgccgccgccggctgctgtcgcatcagcagagcccgcggccgaggccaacggtgccgcgcctacagcccctgccgaaggagaggtggctagtgtgcccgctgtccagcccgcggctgaggccgccgccccacccagcgccgatgtcgacatggtcgacgactcgcccgaggctcttgcggccaaagagcaggagaaggagcaggagcgcgcgcgcgagaaggagcgcaaggcgtgctgggaggatcgtcgcccgcagctcaacgaggcccggacggcgctcacgggcgacctctgcaagcgggccctcgagctcgccgaccggtacgagtcgctagtctacgacatcaagccggcctttgttgactcgatcgatgcgatcgactcgatcacaaaagagacggcggctctgatccccgacgccttcaacaccaaggtcacgcaggtcaacgtccggctgcgcctgctgtcgctcatcctccacgacggcccgccgtcgctcgttgccgacaaggatctcgccgctcaggtcatgaacctcgtcctcaagctcgtaccgagcgcagaagatgccaagacgagtcggcccgtctggctcccaagccagcttcatgtcgccgaggcgctcctcatcctgaccgagagcgtgaacaagattgagtacctgcccgccgagtccgcgaccggcactccggcgtcggtcgagctcttccagggcccggcctttgtcgatgcgcggcgcgcgctctttgagcagtgccttgcgctcctcccgatcgccggcctcgcccgcgaagagtttgcctcggccctccggctgctcgtcatcctcacgcgcgactacccgcttgcgctcgactttgcccggcgcggcgccatcggcctcatgctcggccactacaaggcggccgagcaggctcactcgggctgccaggccttcatcgccatcatcctccggcacattgttgagagccccgacaccctccgcgagatcatgcggcgcgacgtccgtcagtggttcacaagcccgcgcaccaaggtcgtcgacgtcaaccacttcatcaagaacaaccggccgtgcgcgttgcgcgacccgcgcattttccgcgaggtcatcgccgaagagtgcgtcatcctcgagacgtacagcgccggcgtccaccacatcacgctcaagtcggcggccccgacggcgaccaaggctgctgccggtgccgctgagtcatctgctgcgacacaagccgaggcagccaagccagacgctgccgcagccattctcgccgatcctgctcattcgatgcaggtcgatggcgacactgtccagccgcccgacttcgaggtcatcgagtcggtcgtccatcaccttctgtcggagctgatggccgtcggcaagcaggctacctacgcggcgcttcaccccgagccggcccctgcgacgatgacgacgaatagcatcgcactaaccgctgctgcagcatcgtctactgcctcagcctcgtccgctgctcccgccgcgccgcagccggccgacgctgctgctcctgcaactgccactgccgcagccctgcccgagccggcctcgaagccgcaggattcgtccgactacgtctacgcgtgcctcctgatgcagaacctgaccgagctgctcggatcctacatgtcgtgcaaggctgcgtgcgtcctcctccttctcttgatcagctcccactgacggctctgactgaccttctgacccgccttcccgctagcttccttacgatgggcaagaagcgcggcggcaaggagagcctctttacgattgctcggccccggacggcgatccttaacttcatgctgctcgagctcgtctgctgcaccggcctcgccgatcaagtgccgccgaccaagccgtcgctcaaaaaggcaatggacctcgccaactgcgccatgacggtcctcgtcgcgctctgctccgacgtcggccttggtaccgacctcaaggacacgccggttgaccttgtcgccgttcgtaaggtcgtcctcgacgcgctgtccaaggcaattaaggacgcgacaacctcgtctgagcacgtcgacgtccgctacggccggctgcactctctcagcgacctctgctatcgtctcctgacggcccggccgagcgtccagcccaaaggccaggaggacggctcgctccacatcgccaaggtgatgctcgagaagaactttgccgtcgctttgaccaacgctctggccgaggttgacctcaattatccggaggtcaagctcgtcgtcctcgacatcctcaagccgctcgagcacctgtctgtctttttcttcttaagtttgtccagcatcgtgcccggcgcccgagctgacctcactctcttggcgtcacgaacacaggaccaaaatctcgatcaagatgggccgcgcgtccgacaagaagaaggacgccgcgcacgagcatgccgacgtccatgacgcctcgtcgacgtcgtccgccatgatggacgaggacgatgacagcgacggcgacgtttcggttcaggccgaggaggacacgcccgacctctaccgcaactctgccctcggcatgtgagtcgagccgcaagttaactttgcccgaaaggccagactgaccttgcctttaccctattctttaggtacggcggcgagatggaggacatgtacgacgaagactcggaggccggcgaggaggaggactttgacgagatggacgagctggacggcatgaccgagggcccaaccgactcgggcaccgacaccggctcggacgacgatgacgagggcgagagtggcatggaggacgacctgatcgccgacgaggacgactgggacgacgaggacggcgaggaggacgaggatggcatcgaggccgccggcggcgagactgacggcgatgaggaggagatgatgtacgacgtaagggctcgccgctgatcttgcgctcacatctcgaccgagctgaccgctcttttcctcgactcgcggcagcccgacggcgacgacatggacggcatgcacggcatggacatggacgagatggacgagatgggcgaggacggtacgtctctggctcagctttccgcctcgaccggcttgtgatctgacgccgcttccgtccccctctcgtagacatgccgctgctcgacgacgacggcgaggagtatgatcccgaggacgaggacgacattgctctgtcggagcttgtcgaggccggctacgatatgccgatgccgtcggacaatggcggcagcaaccggctcaccaattggggctggcagcagacggccgcgcccgccgcaggcgaccacggcgacgcgatccggcgcatttctcggatgcgtgagtcgctctcgtttccgccctgtcaagggtctccttcgctgaccggtgctcgaaccgtctttaccctgtgccttccacagccgacgcagctggccttcaagccttctctgctggcggggccgctctcgacctgcctctgcccggctccggcgaaggcttcgaaccggcccggctgatgcctgctcctcgtgtccggggcggcctgccgatggctagcgcaaccggcctcaacatggctcagctctctgctggcggggctggtggcgtgcccgagatcatttcgacgatcgataacctcattggcgacaacggtgctgcgatccgcctgctcgagcaactcgtcgcccgcagccagcacggcggccacggcggcgagactatccgcattggtctcgcctcggcagcggccggcggcgggccgggtccaatcgtcggcggcttcagcatcaaccgcgatggcgtcgtcggccgacacggtgacctatcgtccctgctcgagggccggcctggcagcggcgctcaccgcgacttgacatcctcgtcgaagaacgagtttgtgcccctgcccacgatgcagcgctggctcgatgaggagcgcatcacccagggccgcttctcggcccaacggatcaccgacctgaccgttcacgtcgtcaacgcgctcctgccggcggcgcgcgaggctgtccgcaaagccaaggaggacgaggcggccgaggaggagcgctcgcgcaagcaggtggaggaggacgccgctaaggccgctcaggcggcgaccgagggttccgctgctgctgccactcagcctgcgctggaggctgccgccgtctcgaacgcgccggctgcatctaccgcagcgggactggacgccctgcccgacagtgttccggcgcccgccgcggcaacttcatcaacagccgccgatgcggccgcggctgatatcgcgatggccgacccggctgacgaaagtacgcggcttgaaatcctggtggatgtcctgcgccctctgctgacgcgaaacgcctttctctagccgtcgatggaccttcagtcaacactgctgcgtccacagcagacccctctgccccgagcgccgacgttggccttgagggtacgttgactcatatttcccttcccacctgccagagcgattcgctaacgaagcttctcgcctaagcacagacgagattggcgacttgagcgagagcttcggagacgagcacatcgacgtcgagattgacgacgacgatgacgacagcgacgacgacagccatggcggagaaggctcgatggacggcgacggtgacggtggaggcgagcgcatcaccatcaccatccacggcgaggaggtcgacattaccgacaccgggatcgacatcacgttcctggaggccctgccggacgacatgcgcgaggaggtgctgaaccagcacttccgtgagcgccgcccggcgccttcgtcgttagccaacgcgccgaccgaaattaatagcgagttcctcgacgcacttccgcccgacatccgggccgaggttctccagcaggaggcagtcgagcagtcgcgtcgcgaccgtgaggctgccacccgcgctgaacgcgaagcagcccaggcggccggcgctccggcaccccaggcggccgagctcgacccggcgagcttcctccagagcctcgaccccgagctccgaaatcaggtgctgatggagcaggaagaagacttcctccagtcactcccgggcggcatcctgcagagcctgcagggtcgctcggccccgcaggccgcacaccggcgcttcgacccggccgttggaggccgctccgatcagcagggcgagtcttcggcctcgaacgccaatgcagccccggcacccaagaagccgccgccgcgggacgcgatccagctcctcgagaagtcgggcattgcctcgcttgtccggctcctcttcttccccgaggtctcgcgcaagtcgaccgtcccgcgggttctcgtcaacctctgcgagaactccaagacgcgctttgagctcctcaacatgctgctcacggttgtccaggacggtaccggcgacctctcggccgtcgacaagagctttgcccagatgtcgattcgcgccggcaaggcaagcacgacgccaagggcaacgcccaagaagaagggtctgcccgaaacgcctgggccggccagccttttctcgcacctgtcggccgagagcgtgccgacgtttatcgctcagcgctgcttcgacgcactctaccagatcgtcacctccaacgagcaggcgccgctctttttcctgacggagcacgacgtcctcgtcggcctcaagcggccggtcaaccgcaaggccaagggcaaggagcgccagattctgcagaccaagtacccgctcgtcatccttctcggcttactcgaccggccagctctgctcaagaacacgggcatgatggagtcgctcacctcgctcctcgtctcggtcacgcggccgctgacggcgctgccgacgccggcagcctcggagcctgccaaggagagcctgctggcgaccgtcatggcctccatcagctcggcggcctcctcggcgactgcggcactcgcgccgacgccggctaccccggcaaacgccactgcccctgcggcggccgcggccgccacccagcccggcgctgccgccgttgatgtcggaagctcgacggccccgaagcctgccgccgagtcagccgctgcgccggtcctgtcgcatccgccccaggtgcccaacaacgtcctccgcctggtcgtcaacatccttacgatcggcgacgtctcgagtgcaacctttaaggcggccttgaccctcatcaaccacctctcacacatccccgacgccaaggaggtcatcacggccgagatccgttcgcaagcccaagactttggcaacatcctccaggccgacctcgaggagctttcgcgggcgctccagaccgacgacgagcacgcgtgggctgcgacgatcgccaagtttacgccggcgtcgtcaacgcaggccaaactgctgcgggtcctcaaaacgctcgagcacatgtacacgatcaagccggtcggaggctccggctctgcgagcccgaccgtaccgccgagtaagtcgttttcgcggtgctccctttgtccgtgccttggtcaccgacgccctttccttctcgcgctcgatcagcaccggcagccccttctgcgctttcagttgccggatccgcgcccggcgcgtcggcgagtggtgcgaccgcaaggtcggccgtggccagcgccaccccggcagagcttacacagacgaaggagcagcaggtcaatgccgtctacgagagctttgactttggtccgctctggcagcgactcggcgagtgcctcgccattgtcgactcagccggcctcaacgacgtcgcgaccgtcctcctgccgatcatcgagtcgctcatggtcgtctgcaagtatgtcggcaccaaggccgactctggggtcgcccgcggctcgctgtcgccccggtcgccggtggccacgctcgactcgaccgaggacctcttcctgcgcttcaccgacgcgcaccgcaagatcctcaacgtcctcgtccgcaacaacccgtccctcatgagcggctcgttcgcgctcctcgtccagaacccaaagatcctcgagtttgacaacaagcgcaactacttcacgcagcagctccggcgccggccgaaccgcgaggcgccgagcgcgctgcaggtcaacgttcggcgcgagcatgtctttgaagattcgttcagccgcttccagcggtggacgcccgagcagatcaagtttggcaagctcaacatccgcttcttcaacgaagagggcgttgacgccggcggcgtctcgcgcgaatggttctcgtgcgtgccgccgtctcttgcggaacatgtgccatttcgtcgactgacatcgtccttgccgtgcctcgcttccagtgtcctggccaagtcgatcttcaacccagactttgccctctttgagccggcgtcgagcggcgccctgacgtaccagttcaaccggctcagctcgatcaacccagaccacctcgcctttttcaagtttgtcggcgtcgtgctcgccaaggcggttcaggacggccgcctgctcgacgcccactttatccggtccgtctaccgccaactgctcggcgtcaaaaacatgggcctccaggatctcgagacggtcgatccgtcctaccacacctcgctcaagtggatggccgagaattcgatcgaggacattctcgagctctcgttctcggtcgagaccgatgcttttggcgtccagcaggtccacgacctcatccccgacggccgcaacgtcgccgtgacggacgacaacaagatggaatacatccagaagattgtcaacttccgactggccgactcgatcgccgaccagagcaaggccttcatcgacggcttcacctcgtgcgccctccttccgagcttcttgactattgctgggaggcacagcgctgacctgtttcccttccttccttaggatcatcccccaggccctgctccaaatctacgacgcgagcgagctcgagctgctcatctcgggactgccgacgatcgacattgacgaggtccgtcctgtcatcctggccggacgctcgacccctgactgaccgaccttgccccggcccacctctgcagctcaagaactcggtccagctgcacggctggcgcaacagcgaccccgagatcgtctggctctggcgcgcgctccggtccttctcccaggctgagcgggcccaattcctccagttcacgacgggcagtgcgcgcgtgccgctcggcggcttctcgcagctcgtcggctcaaacggcatccagccggttcaggtccaccgcgctcacggcgacccagaccggatcgccacttctcgtgcgtcgcctcaccgcagtcgccacccgccgccctcctcttgctgacttccccgacgattcgatctcgacagacacgtgcttcaaccagctcgacctcggctcgtacagtgcgtgccctcgaagcctggggcggtccgcttgcacgtcaactgactttctcctccgctctcgtctcttcacagcctcctacgagacgctgcgcgacaagctcatgctcgccatcaccgagggcgctgtgggctttggctgtgagtggctgcccgagcgtctctcgatcgcttgctctgcgctcggttgaatgatcgcgctgacgtcctgccactaccgcctttggcagtcgcctgagttgagtcgccgtcgctggccgtcgcgtgcgctctggcgccgcttgcgttcacgcagcctcggcgagcccggccatgccttcgcccgccgaggtcgacccgccaaccttctttccctcttttcgtctccttgaaccccctcccaagactgtacacctgtagcatgagagctgtttctcgtttgccttctcgcttgttgacagcaagcgattagtggggagagcgaggtcgagtgagcagcaaacttagccggcctgccggatgcgcctctttgtcggagaggcgatcgcaaagagaggtcggtgagtcgatccggggcctggcttgtttggacaggcccagcgagcagcagaccccgcgtcgcccctgctaggcaagacatggccgagcctgtgcacgctcgcgcgctgcttcgacgtcgggggcgcggcgcgacaagttgatgagctgccgcccgcccgctggaaccccgctcaactctccctctcgcccgaccctgtctctcaccaccactctcttgcatcttcagtacagcgcgtgctcggcctcgttcccggcagcaggcgtccctcgcgacccaccagccttcgcttcagccagtcgttgtctccagcaacccatccgacaggcccgcagccccaccttcttccttccttcgttcagccctccgcccctacccttcgacgcaacggctggccggattacccgatcctctcgccgagacccaccacccgtccttcgtctctgagcagtcttctcttcgctgccggccggtctgcgcccgatggcgcccttcctcgagagccgggggctcatcccgcccaattcgaagagtacgtcgccaggcgggccccggctaggcttcccccggtcgacagccggcgggccgacagcgccggtcctgacgctctcgctgctcctcgcacatccctgcagacctcggtcaggtcggcgccgtcgtcgacatctgcatcctgttctttaccatcatcggaggtgcgcgctgcttctgcttcctccagccgctgcggcgctcgcgtgcagagccgcgctcgagacaggcgtgctgaacttccttgtcttcctcaaccttcctctcgacggcacctatagcttcaatcatccttgttgggctcattctcaaggagttccggacacgggcgagcaccgtccggacgcggctgctcatgatgctcgtcttttccgacctgtgagtcgaccgaccgggccttgttcgttggctcaccgagctccgacagggctgacacccgacgaccgccatcgtgcctccgacagcttcatggggtacgtccgccctttctctgcttctctcgtccctgactgactgtgatactctctccagcatcatcggcatcatctcgccgctctactacgtgatcacgtctgggccaggaggtgcgcgctttgcttccgcgtcgttgcctccgtcggtcgtccgccctttcgcgtcgggctgactctccctcccgactcttgtccggccaggccccgagggccgtttgtgcgatgccctcgccttccttctgctcgcctcgttctggagccaatactttgtggcgatgctcctcacgtcgtgcacgtactgcatcctcctccatccgctcgcgaggatcacccgcgccatccaggagtactacctctggttcttcccggccgtctgggtgctctcgtttgtctttagcggcgtcgcctggtacgtcgccgactttagcttctcgggcggcttctgctacatcggcaccgagggtccgcgcttcttcggcgacatgttgtcagtccccttgcctgccacttctcttgcgtcgactgattgcctccttcgatgacgccatattgtagcgcctttatcccgcgctcgatcgtcctcatcgtcgtcgtcggcctcaccgcccacctcattcacttcctccggcgaccagacaggctgccagcggccgggtcggacgagatccgctcgcacgggacgagctcgccctggtggggccgcggccggctcggtcggcgtgtcgggatcgagcgctcacgccaagggagctcacagatcgagccggtcgaggattctggcacccggacgcggcaaggcagcctcgcgcacctggcggccgtccaggctcacggccagcggcagcagcgcaagtcggacaccacggcggtcgaccccagggcgccttgggaggcgatcgacattgagatgccgtccaacatacccgattttgtctttgaaccgccctcgcgccgggcgagcgagatgacggccgcctcgcgcaaccagccgatgacgccaccgtcgggctacgaagtcgacccccggctgtcggacgtcgaccccggtggcatgaagccgatggtcgagccccggtccgactgccacgaatttgagcggtcgtccgacgagctctttgtcggacagtcgctcacgccccaacggccagcctcgccctcgtcaaactcggtccacagctcgctctcggtttcgaccatcgactcactttctgccccgccgctcaggccgacgccgaaacgccagagatcgcacccggccatcgccggttcacgaaagatgtcgctcagagacatcctcgacgccgacacgtcgatcacacttccgccgctcggcagcggcgacggcagccagacggcctcgcagatgaggcgcaactcggagggcgtcgtcctgaacgaggagtcgctctcgagctatatgaaccgcaaagcctcgctgctcatgatcctcttcccgctggccgtgagttgccgttgctcaatcggctctcgttacaggccctcgacctgacctccctttctttttcatccgtcgcagtatgtcgcgctcttcagcgtcagtctcgcgcggattgtcgtcgactttgtcatcgagcggccggtaccgtggctgtctggcctgtcgcgcttcttcatcttcagccagggcatcgtggtacgtttgactcaaagtctcagcctcctctgcgccatcatcagacgctgactaacacacctccctcgttcgctgccttcaggacctattactgttcgtccgccgtcgctgcccttgtacatcgcatggtcgaccgctgctcatgctgacacctccctctcgtgcctgaagttatggcctcgtcgagtggcgcgttcggcgcggtgtccaacgcaagctccacgccggtcactttgactcacgaggctcgatgtcttgacctcgccggcccaggaccttgtggctcttcttggcccgttcggccagtctgggctatcgacgccctcgggggtagaacggacgacctgcgccccggggcccgcagcagcctgagtcatgccctccgtctccccgcgtcatcctatcccatcactgcatctgcgttgtaactctcctcttttgggtcttgtctccttggtctatgcgtctctcatgtctttatgtcacgacaccgtttgcgcgcgtgtgtgcatcagtgtggccggcagccataacatcaaacagtcttggggtcgcgctcgagcaggattgccgcccggggctcgatcttgtgatagtagttctcgacgctgaaaagaggccggagcggggtcaggaagagttcagcctggtcgggactgaggtataggctgcaaactgacgtctccttctcgacgaatccagcctttttgacgtagaagctcttggcctcctcgttgctgacctgacagtagaccatgatcttgtcgaccgaccgagcctgctccttctccttctctttgctggccgcgcgcgtctttccggccgggacgtcgggcggcgaccattcggccgccttggtcaaaacgtggtcgagcaggtgcgcgccgaggccttgcgaccgatacggaggcaggacgttgagcgtcaggacgtgcagcttcagcggcgtcgtcgaaggcgcagacagcgccggctcgaagcggcacgtgacggatccgacggggacgtcggcgtagtagactgcgagcacgagggcagcccgtcgtcagttcagagccagtctgccagtatcagcacgatagcgcgacttaccgagcttgttaaagtcctccatcgtctcgtcgagcacgtccgcgtaatactagagtgcggcggcagaggcggccgaagggtcagcctcgagggcgagtgcaagcgcaagcaacagcctccacgcaccttgtcagagtagtggaccgggaaagtggcctcatttagcttgcgcagggtgccgctgtcagaagggcgagacgacgacatcagctcctcgagtcgtgcagtgactggcgacggcggcgaccgcgcagaaggacgacggacatgttgttagccgtgacggatgagagcgttaccctcggcgagggcttgaccggcagcttggtctcgggcttgaagggcgccgagattgtgctcgaggtggcggcagttgcaacggaggccatcttgcggtaagaagattgaacgagaccgggcaaatgcgagaggggactgcaatgcggaggccggaggacgtgtcgaagagctcgtcagcgtcggccggtcgggcaaagtcggtgtccttcgaaagccagcgttcaggagcacacgcacagctccgagaaggtctgctgtggtcgaacaaaggcaaagatggaggctggctaaagatgtttcgaggtcgtcgtcgccggcgagccactttgctccgcctggcctttgcgttttgcgcgcgaggccgagctcgaagcttgccagctcctcaacaatcactctcttctcactcccttccccttctctttccctctcttttgccttcttgtacgtccgccgaaatctcgtgatcgcctgctcaacgtcgagctgacttctctgcgcgttcgctccttcctggcggcgctggcagctcaatgtcggccatcgagctcgtgaacccccgggcagagtccgtccgtcgggctcaggcactccaggtgcgctccggctcagtcgggaggctgtgaacggccctgacccagcgtgcgctcgcaccttgcaggtcaacacggtcggagcgatcggtcttgccaacgtcgtcaagagcaatctcggtgcgttctgaagaggtctcggcggcgcacgcgacgaccggtgtggtcagcgacgcgaagggactgaactcgagaactgtgctcgtctgcaggcccccgaggaacgatcaagatgctcgtcgacggttccggcaacatcaagatgaccaaggtcggtcgctttgctgcgggttggaccgcgagctcggcgaggctgaccaccctttgatccggacacgcttctccaggatggcaaggtcctcctctccgagatgcagatccaggtcagtctcaagctgtcctgctgctcctagcgtcagctccagctgacaaagcacctctcgtgaccttttgcgcagaaccctacggcggccatgatcgcgcggacggcggtcgcgcaggatgagcagacgggtgacggcacgacctcggtcgtcctactggcgggcgagctgctcaagcaggcggagcgctacacatccgagggtgtacacccgcgcgtgcttggagacggatttgacgttgcggccaaggaggcgctgaaggtgcgtcgacgcttgctccctgagcgcgggccgccttcgctgacgctttatccttgggctctgcctcgttccgtgacagttcctcgacacgttcaaggtccagaagccgacgctcgatcgggcgacgctcgtctcggttgctcacacctcgctcgccactaaggtccattcgaagctcgcgactaaggtggccggcctcgttgtcgacgccgtactcgctgtgcagccgccggcaccagctgccgatgccgtcggcgtcgatgcattccagcacccgatcgacctgcacatgatcgagatcatgaagatgcagcacaagatggacactgagacgtcgctcatccgcggcctcgtcatggatcacggcgcccggcacccagacatggccaagcggctcgaaaactgcttcatcctgacgctcaacgtctcgctcgagtacgagaagacgtgcgtcttcgttcgagacctgcttcccgcaattgcccgccgatgctgaccccggcgctcctttcccttggcgcagcgaggtcaactcgtcgttcttctactcgtcggccgagcagcgcgagaagctcgtcgagtctgagcgccgctttgtcgacgccaagctcaagaagattgtcgagctcaagaacctcgtctgcgaccaggacgtcaattcgaaggagaagccgcggtcgtttgtcgtcatcaaccagaagggcatcgacccgatgtcgctcgacgtcctcgtcaagcacggcatctttgcgctccgccgagcgaagcgtcgcaacatggagcgcctccagctctgctgcggcggcacggcccaaaactcggtcgacgacctcaagcccgaggtccttggctacgccggcctcgtctacgagcacacgctcggcgaggagaaatttacgtttatcgaggagtgcaaggagcccaagtcggtgacgctgctgatcaagggtgcgtgctcccgctcgctcgacgtgtcgccccgcccttgcgtcgcttctgacgattcctactctccttctccgatggccgcctttaggccccaactcgcacagcatgagccagtcgaacgatgccatccgggacggcctgcgtgccgtcaagaatgcgatcgaggacaagtcgctcgtccctggcgcgggcgcgtttgagatttcgtgcgcggcctacctcctgggcgagacgaagcggctcgccaagggccgggccaagctcggcgtgtcggcctttgccgaggcgctcctgatcctacccaagacgctcgcggccaacggcggctgggacgtccaggacgcgatcgtcgcgctccaggacgaggaggccgagggccacgtcgtcggcctcaacctcaagacgggcgagccctttgacccaattagcgagggtatctgggacaactaccgcgtcaagcggcagatgctccactcggcgtgcgtctccgacctgcaggccggtctgcctctcgacgccatgctgacccgttcttcgccctctgatctccgcagctccaacatcgcctcgtcactgctgtcgtgcgacgagatcatgcgcgccggacggtcatcgtacgtcctacgtcctgtctcaccggcgaccttgcgggctgacctctcgactttgcctttttctctcgcaggctcaaggagggtcagtaaagcgagcgggtgtgcgagagagaaaggcgcgagagcgtgccccctgtataccgacatgccccttggagcaatcgcccatccggctcatcgccgctgtgaagcaggagaaaggttcgttcgcgggtctgacgagtgttgcgctggcaggcaggcggcctggccaaggcaggttgttgctgctgcgcgcctccacacggactcgcgtcccggtggcggtccaacgacgtcgccacctgcgtcagcagctgctctcgccatcccgtcccttcatcgccctgctgcgaccaccacgaccctcttgccatctcgctcttcctccactctcaataccactcactcacacacacagccgacctcttcccgctatgccgaacacggtgcgtcccttcctctccgtcggctgcgcatacatgcggccgtcacgacaccggtcgctggactggcctttgctcctgcttcattgggtccctcatatcgcagactgacacgacgctcgtccatgctttgacctctcgcaggccctcgatgtcaacccggtcaacgcgtgagactttcatcagaccggcggtgtcaactccgccctcctcggcctggccacggcttgactaaccgcttaccgttcccatctcacccttcgccgcacgcaggacgttcgccatgacccgggccggctccagctttgcttgggcgtgagtgtcggcaaaggacggctctttagcttgacgcaggctgctgacgcaagtgactgccgcctgcgcagctggtttgccttcatgacgctcctgctactctgcatcatcggctcgctttttgccgtccgccggagccaggtccgtggcgccgctcgcctgcgtcggccgctgcgctgctcgctgattggcgcctagcccgataccgcagcggaccttccaccggcttgccgtcctgatcgtcttcatctacgtcatctactacttctgcatcgcggccgaccttggtccatcgtcgtctcgctcagctcctgtcgtctatgccccttgctgaccgtcgctgccgggtcggtcgcaggcgctaccccgatcgccgtcgagttccgcggcggcacgcctcgccagcgcttccggacggccgatggcgcggcgacgcgtcagatctggtcggtccctcgaagcgacgacccgtatcttgtagagggagcacggagggctgatccctcttcgctgttgcttcgccccggcaggtacgtccgctgggtgtcgtacagcctagtctggccgctcgtcgtctacatgctcttgctcgcgaccggccggcctgtgagcgagtacgttgttacgatcggcttcacgctcgtctatgccgtctgcttcctgatcggcgctctcgtccggtcatcgtacaaggtcgggcccgcccttctgcgagcgcaatgctgtcaacaggacgctgacactccttcccttttcgactgctcgcctctctcgtcgccagtgggggttcttcaccatcggacttttcgccatgttctgcgccgtctacgagctgctcgtccctggcctgcggtccgtcacccgcctcggccgcggctaccggacgccatacctcgtcgtgcgtcgccagagggaagcccctttctgctcccctcgtcacgctgctgaccggtcgacctgcggtctacccgccctctctgacctcttgatcagccggctgctacccttgcgtgagttactttgtccgtcccgcgacactcgttccaagctctgaccgcccaaacccgccccgccagtttcctctggatgatctaccccatcgcctggggcttggccgagggcggcaatgtcatcagcgtcaactcggagtgagctcgtcgtcttgctgcccgtccctccagagggcaatcccctaacgcagccgttccccctgcccgctcgtccgatccagcatcgtcttttacggcagtcagtggcgccgacgggctctagtgcactcacggcttcggactgactgccccctcctccttccctccgccagtcatcgacctcgtcctcgtcacactcgtcgtcatggccttcctcggcctcgtcagcaaggtcgaccattcgacgtacgatgcgcatcgcgtgcgttccctcctctaagcgcagtgtcatgcagtcgccaagactgacgcctcgctctctcgttgctttcgctctcgcccttgcacagtggggggatggggacgaggacgtcctctgggagaagtcggcccgccaccgcgactcgacctcggccgccggccgcgactctgttgaggcaaccggcagctcgaccggctcgaccgccgtccgcgcgaccgaccacgcccgttctcgccagacggccgccgccggtgcgcctgcccagtcgacgacccgccctgtcactgtgccggtcggccccgtcgcgcccccgctcgagacggccggccagcagagccaccagacgacgaccgtgaaccactaggcggcgctccccgccacggctacggcctgcccgcttgaggctttgacccgcggcgcgcgctcgactcgccactcgcttgcttcctttccgctcactcttcatcttttcaatctcctctcggcctctaatttaattcaaagcgcatcggccggcgctattctcccacaccactaatattgaaccgctccacccgtctgtagccttcctctacctccgtcactaatcggcgcctttgtcgccgcccctcccgtcgtctcctttacatgtcgcatgcacctcatcactcttcgaggaaagccgatcgcagaggaggtgggagtgaagcttcacggcgagggccagacagcggagaaagtgacggaggggcggagagcgtacctcgttgttgagtgtgcctcgaccggcacgagcggcgtccacctcgcagagctaacctcccgaccgacagctcggaggggtcgtaaaatgtcatcaaggcgttgcagtcttgtcgtctgtccccctctctcctccctcctttcatcgcctggcgagcgccttgtcgatcgtgtggtacaggacgacgctggtcgattcgccaaagccagcccagcctcgattccccgaggcggtgacgagaaacttgctgagcgggtcgacgactgatgggaggagagcagcagggatcggatcagtcgcggtcgcggttggtaagaaacccgtttgcgccggtacgcactcatcgacgaaatgatgccgccgtggtggccagggacaatcctgaagggcacgccagacgacttggtcttgctcgtagcggctgacgccgagtcggtgtcatcaaagagcgcgtcggtcgcccagagtcggacattgtctgcttgcgcactgtaagacgagttagacgcagtcagtgcgggcgacacaggaaaccaattatcaagggacggaccaggccatgtgcttgccgtccgggaaggcgacgaggcagctgacggcgccggagtcggccgggttttttacgctcttgagcagattcgagccggagtcaaaaacggctgctgaagacacgctagaaggtcggcggacgtcccagatatcgacggcgccgttgcgcctgccggcccagacctgggtgccggtcgagttaaagcaggcctaaaagaaggtagcgggacgcttagtgtcggcggtcaccagggttgacaaacggtagactcgagacgtaccgacatacaccacttgggcgtccgctcgggcccctcgaaacgaccgacaccccgcccgttgccagcctccttgttgctcacgcgccggtcccagaggacgacactgccgtcgatggcggacgtcatcaagacgtcggccgagtaggcgccgtaggtcgccggcgagagagacggtagcgatcgggccaccggcgttgaggaaggggcagcttcggtcgcggctcgtggaggaggaacgggctcggtgccgttcggctcggatttcggcacgaggccattcagcttggtcgctccgttcggcagtgctagcggcacgacgacgggagcagatgtccctgccggcaggggagtgcccgtgctagagcccgtcggaacggcatccagcaggtctggcggcaagtcaagcccggcggccaatccgtcaagctcgccgtcgccaaagagatcgtcgtcgaggtctggctctccctcggcatcgatttccgaaggagcgaccgaagggccgccgtctgcaacacttgctcttgagggcgacgccatctccgcgtcttcgccaggcaagttggcctcagcgggccggccgttggtcgtcggcggcggctgctcttctgttgggttgcgtgcccaagttgagtacgagacggagtgattcggcatcggaggggcgctagaacccgagggcagcggctgcaaggccagcgatgagagctggacattctgcgaggggaatgcgcggagcttcttgccggtgtgaagatcccattcctgcaggttggacgtcggcctgtcagctgcagagactgaagctcaggattgcgagtggcgtgacgaacgcagacgactccatcccagccggccgagtaagcgaggtcctccgagtcagcgagaacaaggccggcgacggctccagtgtgacctccctctagtcgatgctggatccggccaatcgcgtgccggacggtgaagagattgatggacccgccctgagagaggaaatggaggagatcagaaggacgagcgatgcagcaagaagaagcacatggacgcaccgctgttccagacaggccccagagcgcatcacgctgcagcgcaaggctgtacacgggctcgcggacccgctggcgctcgacgctgtcattgtcgacgccattgtggctgactgatgaaacagagctcgctgcttgcggtagaggaccctcgttctcccaccagccgcggcagacaccaccctttgtgacgccctcgccgagcccgccgacggcacgctgatgagccgtcatcagactgccgccgttcgccgaggcccaagtgtcccaggcccggacgtagccatcctcagagccagtaaggacgtaagagagacagggagtcgcggcgagcgagtggaccggcgagtggatcgggatcgacatgtgcgggtcgatgtgcagcgaccgcgccgctggcgggggtgacgagggcaaggtcgggtagaagattcggcgccgtttcagagccggcgggagtgaaggagatcgccgggcttgcgttggagcggaagagtgcgatgaggaggccgggcggacgagtcctcctgaaggcgaccgacccgtacgcagcagccgcggccctcatgtcagcatgaagtcgagcatgcgcaaggggaggaaagacgagaggacgcacccatctgctcgtcgacttctttcatctcctcgtcgccctcgtcatcgtcatcgccatcgtcgtcgtcggcatcgtcgtcgtcgtcgtcgtccttgccactctcgccggccttgctctcgcgacgcgacatgcttgccgtcgcgcccgagtgggctgagaccgagtcgtcctgatcgccatcgtcgccagcatctccatcggccgccgtcgcgtcctcttcgtccgaatcagagccctgccggcgagatcggagcaggtcagcctctccaacctcggggcgtagttccgcaggggcagcgcggggcggccaggagacgagaccaagaccactcacgtcggatgctgagcctgacgcgtctacgtcgtccggatcaaagtcgtcctccctgtcaaagccggatgaacgtagatgtcagccaagaggagcggtaaagcgagaggccatcattgtcgggctgaccggggctcgctctcggccgcgctcagcccgagcccgtcctcatcgtcgtcgtcgtcgtcgtcgccggtatgagcccattgctcctcgtcttgcttgacaggcgaggttgtgatgtcgtacgacgagagatcctcgagcgcgtccattcgccaaagagctggaggcggccagacggtccgggtcgggtcgtccgtcgtcgtcgtcttgagcggcttgaagagagagcctcaactgctcttttcgccgggaccgaccgaaccctcagcaaccatctcctccgcctgccttgaccgccctcttgcccgcttgacattgcacgccctagcttcccagccatgtccgccactcctaccaaggctgaagtccttgcctcgcccgcgaccggcgtgcgtccatctcctctgctcgccgagctcatcgccagctcgcgagcgcgcgacgtcagcagcccgcccgtcccttcgacctaccgtgggactgactggctcgcacctttgctacctgctcgagcagcccggcgcctccgtctccaaaacgcccgacctgccggcttcgacgctcaagctcgagccgatcgaggctgccaagcggctcgcagcgtacgccgctgtcgacaaccacgtcaagccctcgcacaaggcacggcgctcgtctcactgactaatgctgcctctctcagcaattgacgtcgcgctttactatctcaggtcattggcgtcggtagcggcagcaccgttccctacgtcgtcgagcgcatcaagcagcagggcaaggaggccaacaccggccgtgtcttcatcccgaccggtccgtcccgagccgctggccccttttctcggctcggaccgggctgatcaccctcttctttccaactctggccactccaggcttccagtcgaaggcgctcatcactgagtcgggcctgacgctcggcgacctcgagtcgtacccgcgaatcgacgtcaccattgacggcgccgacgagtgcgtcaatgatggcggctcgaagcctcaacggctgacaactgcacaatgctgacgtcggctttctcgcgcctgctctccagggtagacaacgcgctcaactcgatcaagggtggcggagcgtgccagctgcgcgagaaggtcctcgccgaggcggccgacacgtgcgtctgacgctgacaagttcgagcgagaagtgtctcgacagctcacccgcccgcccttccgcgcccacagctgggtcattgtcgccgactaccgcaagaactcggaggtccttggcacctcggtgaggcaacccgtcgccgccgtcctctagtgacaccaacactgacgcctgcagctcgctgctccgtctcgcagtggacccagggcgtgccgatcgaagtcgccccctttgcctactcgcctgtcctgatttcgctcgagaagctcggcgcgacctcggccggtctccgaatggccaagatgaaggctggcccggttgttaccgacaatggcaacttcaacatcgacgccgtcttccccgagagctcgtaccgcgacccggcaaaggttcgtcacagccgtggaactggtgcgctgcttggattgcgactgagagcttctcccttctacagctcctgcgcgacatcaagctcctaaccggtgtcgtcgaggtcgggctctttgtcgacctggccaaggccgcctacttcggtaataatgacggcagcgtcaccgccaagtgggccgacggccgggtcgagaaggtcgagcgggcagactagcctgggcggtgatctgcggacctttcaatgtgcttttctccagaaagcgagcgagtggcgagtcgagcgcgcgccgcgggtcaaagcctcaagcgggcaggccgtagccgtggcggggagcgccgcctagtggttcacggtcgtcgtctggtggctctgctggccggccgtctcgagcgggggcgcgacggggccgaccggcacagtgacagggcgggtcgtcgactgggcaggcgcaccggcggggccgtctggcgagaacgggcgtggtcggtcgcgcggacggcggtcgcgcggacggcggtcgagccggtcgagctgccggttgcctcaacagagtcgcggccggcggccgaggtcgagtcgcggtggcgggccgacttctcccagaggacgtcctcgtccccatccccccactgtgcaagggcgagagcgaaagcaacgagagagcgaggcgtcagtcttggcgactgcatgacactgcgcttagaggagggaacgcacgcgatgcgcatcgtacgtcgaatggtcgaccttgctgacgaggccgaggaaggccatgacgacgagcgtgacgaggacgaggtcgatgactggcggagggaaggaggagggggcagtcagtccgaagccgtgagtgcactagagcccgtcggcgccactgactgccgtaaaagacgatgctggaccggacgagcgggcaagggggaaggctgtggaaggttacgcgtcactgtccaggaagtcgcaagctgccaagatcgctcatcacatcttcatcggtgccgagctgtcaaaacccgctggcgctgttgcgggcgggcccgctggcaatgaccctaccgtcgctgccggcggtcctattgcgctcaaatcgaccgttgcttctcgcggctttgcaggtcccgctgctgagccggtcgttcctccgattgcggctgtcggcgccgtagacggttcaggactcgtcgccggcaatgggtgcggtaatgccggttgggcgtcgggaggcggtgacgacgatgagggcgcgagctccgtcaaggctaatgatgacgaagggacgagctctctgagcgccgagaatgatgagggtgcgactgctgcgatgaattctccggttggaggaggctggatggccctcggcggtgaagagggagtcggcgccggaggaggcgaagcaggtaccgacgttgacgtttctggaccggctgatgttgacgggctcttcgcgggtgaaaggtccctcgactgagcctgggaggcgttagaagctgcatttgaggcggctggctctgcaggcgcaggcgatgcgtcggctatcggggccgtcaccggaggctctgatgccgagtcgcccgatctggttgtttccgctgccgctggttccgactcgtctgacgcctctgcctctgtcgcgaccggcgtcggtggcagccccttgctccggccgctacctgacggctcgcctgcgcgcgcaaaagccgccttggcctcggccagtcggttgatctcgcgctcctcgagtcctgcattggactcctcgagagcggcctatcgcgcgagtagagggagggtcagcgatgagcgcattgagctgctaccggggcaagagaagttcacgcacgagctgggcctcgagctcatcgaccgcgtagatcttctttgcgcgatgtatcgagtactcttttggcttgtctgtgtagggcggcaggagcaaaacaaagatgtcaggggcagccacgatcacaagcgggagggagaacgtacgcagagcaaatgtcccgagaacctcgtcaatgagctcgtgcttaaacttgtaacgccgggcggcaagcagtcggggcgtgatcgtgtttgcgagttcctttgcaaaagcgccctcgatgacgtgatgaaactgctgttcgacctgctcgagagctgagagcgccgggtgaaacgcgcccggcggcggcggcgggccgaggtgcgagccgtggtggtgggccgacttgtctttgcgcttgcgcgacttcttttcgcccccgctcgcgttcatcatcgccggcgagggcgagccgacgacgccgttgattgcctgctgctgctgggcctggaggagggcgagccggtccatctggctctgatgatgtgagacgccgccgaccccgccgggcgagggcatcatttggccgccgagccccccgccggccaagggctggccaggtgcacctggctgaccgccgttcagagatatcccccgggcctgcgcggcagcggcgagcatctgggcttggagcgaggccgcctgctgctgctgctgctgttgctgttgctgctgctgtgccctctgctgttgttgctgctgatggtgatgcgcggcagcctgctgctgcaggagcatctgctgctgctgttgagccatcgacagcccacctggtgcgcccggacccggcggcggtggtgggttcggcatcccttgctgctggggctgctgcggtccgcctcggctaagcatgccgccgccgggcaggagaccgccgctgaggctcgaccgctggctgccgccgccaaggaggggcgatccgacggcgccgaccgagccaggaggtcctggacttgggctgcctgcactgccgccggcgttagcagcggcggtcgaagcgagatactgctgcgagagccgggcgagtgttgggttggacatcatcggctgctgctgctgctgctgttgagggtggccctgctgctgttgagcttgctgttgctgttgctgctggagaaggtgctgctggagctgaagctgctgctgctgctgttgaagctgatgcgggttgagaccgcccgacccgctctgcggccgctgctgctgctggccgaatgaggtccccccgccggcgaagggcgagccctgctgctgctgctgaaggtgcatgttcggatgcgcttgctggccgccaccgccgccgtaccccgtcggcatcggctggttgagcgcagccggactcattgtgccgccgcctccgctgccggcgctgccggtcgaactcatcgcccgcgggttcatcgtccgaggcgaaggcccaccaccctggttgcttacaccgccgccaaagccgggtgggagggcaaagtgagactgttgcgactgctgaccgttgccgagcgagggcgagccgccatagccgccgggctgctgttgctgctgctgctgctgctgatgttgttggaagcgcgcttgggcagcaagcagttgctgaggattgatggactggtatggcccacccgccggcgagcctgctgacggctgctgttgctgctgctggaggaagccctggccgagcccgccagcgccaggctgagcccctccctgctgcagctgctgctgctgttgacgctgctgctgctggacctgctgctggaggtacgccggaaactggctgaggttattcgagttgaacatggtccggcgcagacgagggccgtgtcggcgagaggggcgctgggcaagcggcgagcaatccgaagtgaggctcggccggctggcgataacggcacgacggtttgtcggccgttcaactagaccgtcagaaggggagatgagtccgcaaatgaccgagtcggagtggtctggatccgaaagagagaaggtcggtcagttcgacggcgcgacaagagccatctcgggcacaggcaggcggagcagctcgagctccgtcgactcatccaggatggtcaagcagggacatccgacacgactggctagtctgcgaagagccagcgcttgtcccggccggcccgaagccggcgatgctctcgctcgggcgacctgaccatcattgagaagggaggccggtcgcgtccgaggcgaggcccaggcgggctgcgagcgcggcgcatcgtccgacgcctgtcctctgaccggcctagcgtacgtttcgctcccttcctgccgctcccgggttctagggacgcacctgagtcgtctcgtctacacgtggcgcgttggatgctgtcgtctgggctgaggcttgagagtgccggcgcgacctggcgggcgggccggcatgcgcaggcggcaaagtgcaagtgcgagttgcgcctgctggccggctctgcgaaactgtgggcggccgcccgcgcaggcagcagctcctctcttcctccgactcgaccttagaccgaccgaccacccttaccctctttatcaagcagccctcgccatggtccgtgcttcggaaatctctgaacaaacggaaatctctgaacaaacgagctagtgagctgatcagcccacgccctcttcgctttccaactacagcctcaggtctgtccgcactgccagcccagcctccacccagccctcactcgacccaggtcgaggtcgtgagggccgggtcgccctcaagaccttggatcgtcagactgacacgctactcacctccctgaccgttcgcccgctagaacgagtacatcgaggagtccatcaagcggtgcgtcccttgcctgtcgtcgctcgagtagctcggctggccgcccggctcgagctgcgcgcgcgctgtcgcaagacttgtttgacctttcgaccttcggtccggctcgctgacgacctcttctgcctcctctccctccctgaatgcgcatttaggcatggtcgccagatggacgtgagtcgcttccttcctttcctttccgatgaagcggcgtttcgtctggagtcggatcgttatcgcagccggctgacccgctcgcccactttctgcctcgaatcagcacgaagagcggacgtgagtcaacctcctcttttcgcagtctttcgtacgggatcgttgctcggctaggcatctcgcgacagtcaccccggcttcctggctggctgggcggcatccctgttcgacacccacctacgcacggtcgttccgcctgcctccgtcccctttcctggtcagaggccagaggcaatggctacttcgcggacggcagaggggctgtcgcttacgactcgccgtccgcgctttcgtcgcaaagggcaatgccggatgaggcgatgggactcgctgggcggatgccgtgcgaggtggtccggtggaacccgcaaggcgctgagtgaagaaaggtggcagaaactacctgttgggcgctgccgggcttggcgatcaagccttaattgtacggcgagatcgacaggctgtggcctctcacatcagccagcgccttgcgcggtcgtctctgttctcgtttgccttctcgctcccttcaaggcgagctctgaccacctgatgctcacaatatctcacaggcgcaaacgcgaggctcgttccgtccacaagaactctgcgacgacgcagaagctattcggtctcaaggccaagctgcaccacgccaagcggcacagcgagaaggtccagctcaaaaagacgctcaagcagcacgacgagcgcaacgtcaagcagaaagacgagggcgcggtccccgagggtgcgctcccgacctacctgctcgaccgcgagggccagaaggacgccaaggcgctctcgtcggcgatcaaggagcggcgcaaggaccgggcggccaagtactctgtccccctgccgaaggtccgcggcatcgccgaggacgaaatgttcaaggtcctcaagtcgggcaaggcaaagacgaagagctggaagcggatggtgtcgaaggcgacgtttgtcggcgagggcttcacccgcaagcctgtaaagatggagcgcttcgtccgcccgatggcgctccggtacaagaaggccaacgtcacgcaccgtgagtgccctcttccgtccattcactccgtacgctactcgtgactaacgtcatgtcctcctcctgcgaccattccttagccgacctcaaggcgaccttccaactgccgatcctcggcgtcaagaagaacccgcagtcgccgatgtacacggttcgttcccacgcacctttcctctctctcgacgtgcatgactaatccctctctgcccctccctaccctttttttttttcaggcgaagaacgtaaaacagttacctgttggtcttctgggcccagagaatttgataagagaacggggtgggcaaccgctcaagctctactcgagaccagccttgacattctcgccagagacaatgatctgcttgagccagtcgcgctcgcgccggagcgactcgacctccttctcgagcgcagccgtgcgggcctggagctcgcctgcgaggtggaggaaggagtacgtcagtcgccgcagaccaaggggtcaccgcgcataccggccgggacgtacgggcagacttctcgagggcggcctcgcgctccttcttcttggcacggaagcgggcagaagcctcggtgttgcgccgacgcttgtcctcctcggccgagagggcagagggcgacttgtggctaccgacgctgagaggcgggagtcgacaggtcagcgagatgcgcctccgcgcaagcagtgccgagggtggacgcactcgtcctcgaacgagccaggcgagggccgggccgaggccgagaccgagagcttgcgcttcatgccggccgaggcgccgccggcgggcgcgacgtcgacggccgcgcctgggtagccagggagggccgagaaatcaaacgtctcgagcgtgagcgccggcttgccagccgccggagcggccggcgttccctcggtaggggcggcgacgttgttcaccgggagggcgaagaaggtcgcgttgaagccgaaggggtcgagggcgtcctgctgagcctggctgacggccggctgctgctgctggagcgcgagctcgatctgctgctgctggtgttgctggtgctcctgcagggtgccaggagcggtcgcggccgtagcagcagggttggccgacgtcggcgcctcctcccacgagtggtcgggggtggggccgccgacgagggccgccgcctcgcgggcgagtcgctcgtcctcctcgacgagcttgaggccgctgccgagtccgacgccgccgtcgtcaaacgaaaactcgacgttggtccagagcgcgagcgtctcggccaggtcggcgtccgagaagccctcgccgccggcgccgaaggagcctgggccggccgtctggaaggtgttgagcccctgaaggtgcgaggggaaggaaggcatgatttccggtaggtttgccacccgttggtcgattagagaggaggggggaggggagtctactgtctcttgctttggagggtctcggacgattggcactcgggatggtcggtcttgagggaggaggatgaggctggcggtcaatcggcgcgggaagcgcgagcgagcgaaaagggcccgccgcgcccgccgccgcagtagagagtgattcagcgggcggtggctcaaacccgcgggctgaccaaccgcccaagcaagccagatgcccgagcactgcgtcggttgctcctctgatgctgccctccatatgtacatctcgctccttcctagagccagcaccgacctgtgcgcgaggctgaccaggttcaaacgggctttcgactcaaacaaggcgccctctcgaggagtgcgaatgacgcaagccgaccttctaatgaccgggtgcgcagcgcccgtcactcatccatcgacccgtccgcctttgccttgccgtcagcggcagagatggcgccgtccttgatgccgccggcgacaccctcaccgagcgcgccgacgccagcctcgccgagctcgccgcccttgcgcccgcccttggtcggcaggccggccatcttgttgcggagcatctcgtactttcgtcgctgggcgccgctgacactcgggttgaccttggctgcagccgcaaggaagtgggcctcgtcgacaaggatgggtgcctcgcccccgtcggcctgtgccggccggttcgccgggtcgaggtccttcggcaggcccgaaaacgtcaggacgccgtcgtcgacctcgaacgcgccgacctgctcgagctttgagcggagcgcgagcgtcgccgcctcacggacaagggccgcgaggtcagcgcccgagaagccctcacagcgctcgctcgcgacgcgtgcgagcgcgccctcgatcccgggtgcgagcggcgtctttcgcgtcatcgtcttgaggatctcgacccgctcgctcgccgtcggcaggtcaacgtagaggagcttgtcgagccggcccggccgggccatcgcaggatcaatcatgtcgggccggttcgtcgccccgatgacgtagatgccccttcgcgactcaagcccgtcgagctcggtcaggagcgtattgacgacgcgcgaggtcgcctcagactgaaagcaggagaacgtcagaaggtcagcgtcgacgcgcattcgagacggttgttatcaaaaggtccgcacctggccgtcgtcacggcgggggacgagcgcgtcgagctcgtcgaaaaagatgatgcacggagccgaggcccgggcccgcgcaaacacttgccgaactgcacgctcgctctctccgacgtactgcaagcaggaggctctcaatcgggtcagccgatgctcggcgaggcgagaccgatcgcaaggggcgcgcaccttgttgaggacctcgggacccttgacgctgataaagttggcgcgactctcgttggcgaccgcctttgcaaggagcgtctttccgcagcctggcggaccccagagcaagacgccgccgggcgcctcgatgccgacccggcggaagagctcgggccggcggatcggctggacgatggccatgtgaagctcgtcgcggatcgtctcgagcgcaccaatgtcggaccaggtgacgctcgggatcgtcgcaaagccttcgcgctgcgacgacggctgggtcgtcttcagggccgaggcaaagtcaggcgggagcagggcgaggttcgagagaagcgcgtcaggtagggccttctggtgcgagaggaggaacgaggcgatcggcgtcttgaggagcgactcgggcagcgtcgcgaacaggccggtcgatgacggccgaacggcaggcgtcagcagtgccgcagagagcgcagagggcgaagccggcgttgaggtcgctgccgagggcgctgccgacgtcgttggcgttccctcgaggccggtcacagttgtgccgctgccgccgggcgtggtcggcatgtctgctgccacgttctcggtctcgccgtcgacggccatgccgtcagcatcttcctcgccctcgatgctcgcaccaccagttccggccgacgagccgccgacgtcaaggccttcgaccccaagccggacctggccctcgatcgacgagagctcgcggaacatgcgcttgacggcgacgacgccggctgcgctcgtcaaactcgccaggtcggcaccgacgtagcccggggtcgcctttgcgagcgacttgaagtcgatgtccttcgagatgaggagcggcgcgcaaagcgtgcgcaggatcctgcacgggcggccgagcggataatggtcagtgaacgagtgcgtctagggcaaatcgctcggtctgatgacctcactcctcccgaccgccctcgtcgggcactcccatggcaatctcgctgtcgaaccgacccgcccgccgcagggctgggtcgagcgagtctggccgattcgtcgcgccgatgacgatgaccgggttgccatatggcggcttgtgccatgcgaggtctgagggtggctttcgagcggatcagcctcgacgcgagctgagcggggtgcggagaaagggacgcaccgtccatgagcgtcagcagctgggcgacaatccggcgctccatctcgcgctgagccgtctcgcgcttcggcgtgatggcgtcgatctcgtcgatgaatagcaggcaaggtgcgattttctattgttgtcaagactccgggggtcagtgacaagctatgagcgagcgactggcgcagtgtgagccttggtggaccaacctgggcctcctcaaacgtctcacgcagtgtcttctccgactcgcccgacattccgctgacgatactcggggccgagatgctgatgaagggcatgccgagctcctgcggggatcggttcgcaggtcatggccggggtgtagggcatcagtggctggttgcgctgagtgcgacaaattcgatggcaacctcaagcgatcgcatagagcattgcgccgctcaaaagtcgtgtcgatgtgaagaagtgcactcacacctgcgagggcgttggcgatcgccgtctttccgcagccaggcgggccgtggaggaggacgcctcggggcggggcgacgccggtgtggatgtagagctcggggtggaggagtggcagggcgacgagctcgagcagcttctcgatcgtccccgtcagtccgccgagagacgacagcctcgcctcgggtggggcgcgtgacgagccgccggcagtcgaggacgaggtcatcccggccgaggacgacttttgacgcttgagcgacgggtcggtcccggtcgacgacgacggccgcgttcgacgcttgacggcgctcgtggctgtcgccgacgtcgaggcagacgggccggcctcgccactcggaccggcgtcctcgccgccagacgagttggccgaggtcgaggcgttgaggttcagcttcgaccgcttggccggctggtgggcggcccagcccgagaccatcgatttgttgagcgcgttcgacatgccgatgtgaggaggctacagtatagcagagaagacagggcaggtcctgactcgggtttggaacgaaagtcggtggccgttgccgaggtcgtccggtgtggtgaggagggaggaggaggtgcggtctgcgcgccccgcccaaattcggcggcggcagctgtcggctcgttcttgagctcctgacgacagctcgactcatcagatcctctagctagcagaccatgtcgcccgtcgcctcctcgtcctcgcacacgtccgttcccgagcttgccgcctcgggctccggcagcagtggcagcagtagcaaggccaagggcaagggcaaggctcctccggcggcaccgaagcccaaggtcaaggccggctcaaactgggcggcgctcaagcccaaagtgacggacccgtcggcgagcaagaagcgcaagcggccggccggcgagggcgtgggcaaccggctgagcttcgaggctggcggagacgaggacgaggacgtcgagaagacgttccagaggtgcgtcgggcctcctcgccgcagcaagctccaagctcttcgaggcaggacgcgctgaccctgagcgtgcccttcctctccgacgtagaggccgagctgtcgtcgcaaagacagccggaacgaccgtcaaggcgaccgaggtcgagggtgacttctcgtcaccactcatccaggagctgcgactgatggtcctcgggacgtcggctgcgagcaagacgaagaccgagtgcgttctatgccagggcgctctcgctcgtctgatggccgcttggtctcgttcatcttgctgacacttttgcgctgtcttaggcccggtaaatacatggcaatcgattgcgagatggttggcgttggtgcgcagggcatccagtcgacgctcggccgggtgtcgatcgttaactggcacggcgccgtcctgctcgacacctttgtcaagcccaaggagcgcgtcgtcgactaccggacgtgggtctcgggcgtcagtgctgaggatctcgccaatggttcgtcctgtctcgtcgaagttctgcgcgacccggtcatcctgcacgctgctcgccggcctagactgacgtcgagcgccccgcccccttcatctccagcgcctacgttcgagacggtcatcaagcaggtcgctgacctcgtctcgggcaagatcctcattggtcatgccatcaagaacgacttctctgtgcgcactctcagcatcggatcgcagtgcacctcttgctgacgcagccgcttcttaaccccgcaactcacccaggctctccttctctcgcatccccaaccgctcacgcgcgacacccagcgctgtcctcagcttcggacgctcgccaagactaagattcccggtctcaagcggctcacgcagcaggtgctcggactcgatatccaggccgcgtcgcattcgtcggtgcgtccgagaggcgcgagctgctcgaccttgcggcagtctcgctgatgcattcgttgcgtgtccgcctcccatctaccctgcgccaggtgattgacgctcgagcgacgatggccctcttccgatacgtcaaggacgagtgggagccgacgttcggccccgcgatgatccgccacgcgcaaaacacgcggaagaagacgggcgagtcgaaagagtcgtttccgggcggcgggaggcgaggcgtcagctcgggcctcggcgcgatcgtcaacggcaaggcaacggaccgcaagggcggcaagcagcaggctggcgacgacgacaatggcgagggcaactggtgggagtaacggcctacttgggtcgatcggaggagtatgtcattcttttgacaccaggcgctggacgcttttgcgacgactgacgactgacgacccgatcgtgtgagagggcggaggaagtagctacagtaagggaaggatggggaggctaaatggcagggaacgacgacccgatcaggtgcatcgggcgtcctgcgttgggttaagctgccggccggctgaaagaagggcgggtttaggcctcgatcagggcggccttttcgtcgggggtagcctcctcggaggcgctcgcgatggcggtccagtcctcgcggtagtcgtagagctgcttgaattcgccccggaaaagggcaagggcactgacggcgatggaagcgacccaggggaagaggatgatagcgggcagcaaggcgaaaacgtcggttatgttgacgtcctgcagcagtgagaggcatgtcagcgactgaatgccagggtgaggtttgaagacaagggtgcacttcaatctcgatgctgtcgaccccgaaagcaaagcggaagccgctggccagcggtccgagtgcgacaagggcagcgacgcaggcaaccttggcgtacgagaccgaggtgaagagcccgcggtgggcggcgacgaagtgccgcttgacgagcgtgtgggtcgacggcactggcatacggccgccggaggggcccttggtgccagcacaagtcttcagcgagggcaggggctcgagcagggcaacctcgtcctcgtcgtcggcatcctcggtgaggacgatggcaccatccgtcttgagcttggcgagatgctggtcggcgcggtacagaatagagacgacgggcccattgacggcgcagaagaagagggcctggaagacgtagaggcttctgatcgaccgccagtcgtggtcctcgggcttggtccgcgtctcctcgtcgccttcaatcagcttgtcgagcgagtcaaagctgtcctcggggatcacgccagacgcatcgatgacggcaaagacggccacgacgcacatgacaaagatgggcgtgccttgggccggaagaaaggggatgtcagcaagtgagcacaggctgatggcatcaaacgacagacgactcacccatcatgccaccgaggacccgacgcagggagaccgccttctgggcagggaccttggcaatgccgatcgggaaggcgaccgaagccagggcgacgacgacgtagtgaccgacagactcggtctggggcatgtaatggaagacggcgccgactaacagagcgagcgcgaatttcttgggccagctgagcgagaagtgggcgatgagggctgcagaggtcgaccggctgtcagcgagcagtggtgaggagagaagaccgcgcgactcacgtccatcgtggaagcgggcgaacgaggtgtcaatctggccgacgaggtcgagcagcactggcccagacatagagacctggaggtgcggaagcggttcgtcagccgctgaccgggctggtcaaagatggcgaatcacgcacgaaggtgaacgtgaccaggccgttcaaagccttgtccatgacgccggccgagagccgagcgaaggcggcctggacaccaaagaagacggcgagatagagcaggatgaagccgccgatgaagacggtcttcttgagcttgcgcggcttctgctcggccttgacctcctctggctttggagcgacaggcgtcttgcgggcggccttgagattggcggccccaacgagcgaggcgacccagtaagcgtacggggtcgtcgcaagcaggatggcctggaggggtgtgatgaaggcggtcatcgtggcgagctgcagcaaggatggcttgggggtcgacctcagcacaggatgggagtggtcgtttgtggttcagctccgagtgtcagcagccgtccaccttctacagaacaagggcggcgtggggccggctgtcgaggtgggctgaagagggcgcgcggtggggaaaggcaagaacaccacgaatagacggcgagtcgagcgccgcaggagacggatccggcgcgctcttgcacgattggacgacggtaagcccatcctcgtcagggtacgctcgagatgcggaccattcgaggcaggcgaggcaggcactcagaggcaggtcacagtcggaagaaaatcgtcatgagatgcgaatcgacccgaggcggcgccctatgcgacctcgttctcggcaccctcggccgcgacgtcgggtccgtcctcgttgtccgagacggcaagcgtgtcaaactctgcgaggagctcgtcgagctcgacgtcggggaagtcctcctcctcgctctcgctttcggcgccctcgaactcgcccggccggacgagcggcgcgtcgggcttaggggccggcacgggcgggttgacgggcacgccgtccatgtcctcgtccatcgcatgggccgccttcttgcctcgcttcttgccgcctgcgaggcccgagccagcgccaggcttggtcgtcggcgtcacctccatgtcctcaatccgggcggcagcgacggccgcctcggccttgtagagattgatgctcgaccggagctccgggtcctcctcgagctcgcgcaggaagagctcgtagtcgcgctcgacccgctgctggtcgcggccaccaagccggccgatcgcaccgcggccgtggaccttgtcggagccctcgccggggacgtcctcggcctcgaccgcgatcgacttgagcttccagttgcgcgccttgttcttcttgcgccggttcgggtacgtcttcttcacgagcatgacgtccgggatccggtcggcgtcgagcgactcgaaggcggcgtcgttgaagttggcccgggcaaggaagtagccgaggacggtgtcgcccggctggagaatgttgccgaggtgggtgcgcgtgtggaagatgccgtcgttgtccgactcgctgttgtccttgttgttgttggcaaagcagatctgggcgtcggcgaggacgtacttgccccggacggggcccgccggctcaatgtcgagcacgaggaactcgatcaggtccgtcactgacgccagcgccgggaacgggtcgcgccagtagatgttggacgggatgtcggcgacctggagcgtgaccgggtcaacgacctgtatcgagccgctgatgcgcgtgcagacgacgagctggttgatgttggcgagcgagcgcgcgagcttggtcggcaggcagacgaggtcgtccttgcagacgggcgcaatctcgaccgagtacgtaaacttgtacgacgaggtgccagagtgcgtgtctgtcgagaggagctgctcggagcccttggtccggacgggcgcgacggccgcaaggaactcgcacatcttgatcgagtgcgagcgctgggcatacatgaagtcgaggccgtccttggcctccttgacgctgatctggaagaagcagaggcaaacgaaagtagtcagtggacgtgccaatatgtaagagatgcgtaaacagcagacgtaccgtatccttgtgggcattgtgcttgaggatgagctgctcgagaaaaaggaacgtccgcttgtggttgaccttctgccggacctggacagaggccttccacatgttcttggccgcgagccgcgtgcagtctgggcactggccgtgcgagacaatgtactcgacctcaaagacctgctggaggatcgtcgacgtaaagacctccttctggatcgacagcttgacccggatccgcttcgaatgcggctcggtccagacgaacgaggcgtctatcagtcgaacttttgacaggccctgcaggaggagcggagagaggcgtcagccgctagagcgagtggcacactcttcgagtgggagccagaccgaccttcagcttccgcaggcagatactcaggagctctcggctctcgagctgacagccgacccatgagaccggcggcgagagataccggtcgcagttacggcagaagttgatcgacgactgtttcgggatgccctcagtgatgtcgacgctgaggaaggcaatgcggcatcagcagtggtgccagaggtgtaaaggagaggtggctcgggacggacgtgttgcgcaggcaggcgatacaaaggttcgctacgggcagggtgaaatcaggctgtggtcagccggcggccctctctatacgtctcgctgcaagaggcactcaccagagttgggctcaatgggcgttcctacgaggaaggggagacaaggcgggcgggagggcgttaatcagcaggtctcccgaggcacgggccgccaccgagttcgagcagctcgcccggcggaagcgagacgcaccacagtcggcgcagagaacgtagtgaggcacgacggccgggatgtagtccatcttgggcgagagacgatgaagaagtgaagagggtaggtgaagagggagggagagcggagggtggtgagaggaaggcggtcgacgtgagctcgaggtgaagcggccggcgggtgcgggctgcgcgcaacccaaattccgcgcggggttgcaaaagtgcaggcgcactcgcgccggcccggcctcgaggcagagttggcccttttctttcatcgctcgacgcaggatagctaaagattcattacagacgcccgcagcaaggggcgtatagggcacggtcgactgatcccacctgtcgggatcctccctcctcgtccctcaaacggctcgcccaggaagcgcacccgcgcttagagcgacttgaggagcatctttgccgggtcctcgatgtactgcttgatgcgaactgcaagcgaggcgcggtagtgagacgaacgtcagttccggttgcaacgagcgaaggcgagcggggactcgagcgcaccaaggaaggtgacggcctcgcgaccgtctagcagccggtggtcgtacgtcagggcgaccgtcatgatcggccggatgacaatctggccatcgacgacgacggcgcgctcggtgatattgtgcatgccgaggacggcggcctggggaaggttgatgatgggcgtgccgtagagcgagccaaagacgccgccgttggagatggtgaacgagccgcccgacatgtcctccatcgtcagcttgccgtcgcgggccttgatgccgaggtcggcgatcgccttctcaatctcgacgaggccgaggccctcggcgttgcggacgaccggggtgacgagacccttgggcgtcgcaacggcgaccgagaggtcgacaaagtcgcggtagacgatggtatcaccgcctgcaacagaaaaaggggtggactggtgtcagtctcgtgtaatgcctcgcaaaacgcttcaggccgacgcaccgttggggccctcgattgaggcgttggcggccgggatctcccggagggcgaggacggaggcgcgggcgaaggccgacatgtagccgagcttgacgccatcctccttgaggacggcgtccttgtacttggcccggaaggccatcagcttcgacatgtcgatctcgttgaaggtcgtgagggaggcggccgagttctgcgactccttgaggcgctcagcaatgcgcaggcgcatgcggttcatcttaacctgtcagcgcggcgagcgacgagatagcgcgtcagcgagatagacgctctagcagacgcagcgccggacgaacgcgagtctcgccccggctgcccttggcctgggcggcctccttgccctcctcggtcgacttggcctccttgctcggcgccggcttcttctcggccgccttctccttgggagtctccttcgtggcagcctcctccttcttgggctcagccttggccggctcggccgcagacggcttgtccgttttcgacgcagactcggtcggcgggtcggcagccttctccgaagcctcctctgcaggcagcgggggacgcagtcgtcgtcaatgccaaactcgagcctcagacgagcaaaagggacgaagtgaacgcaccaggggcgccctctccggcctcaatcacgtagaggtcctggccgacggtgacggtgtcctcctcggcggcgagcagctcgaggatcttgcccgcgaagggggcgttgaccgaaacgtcgatctagcgacgagcaaagcaagggacgtcagcaagtcaggatcacagatgtcaaccatgtggatccggctccccaatggagcaagcgggacggaccttgtcggtctcgatggtgctgaggaggacgagatgagcaggtggggaggagcgcggccggagccgcatcagccagggcctgcaattggtctaccagagcccgaggacctcatcaggcactcacgcaacctcctcgtcagccttgacgtagtctccgacggccttgtggaactccttgagcgtgccctcggtgatggactcggcctgcgagcgagcaggagagcaagagcgtcataggatcagcgcccgcgaccgacgccgggagagctgaaggcacgcaccatgttggggacctttacagtctctgcagaggaaggcagcacgatacccgtcagcagtctgaaccaggcttgtacttgtgagctgcatgatgccttggacgaagcgtgtgcagggcgcgcgcgcgcgcggctgagaggaaacactgaccggcctggaacacaagcgacgacgagaacttgcggaattggctggccgacacgcgctgggcgaggagcgacgacctggcagcggcacggcagcggcgtggacagcatcgcgcggacgaagggcgagcgaggagagcaggggttgcgtcaggtcgagcgtccgaggcggcaaagcggcggccactcgcagggcgaccgaaagagccctgcgacgagcccttctcgacccgccttcatctgctggagacgcacgggcagagcttgggcgaagcccggaggacggaagcggcaagtctcattgcgggcgagaaggggagctgaaggaggcgagggtaaggacgagacgatggagagagagaggagaggaggaggaggcggtgaggaggcgaagcggcggcggcgctgaagctcagccggcggcgcgggttcgaacctccggccttcatcggcaccagtcgggccaggggacctactcgtcgtcgtcacagaaggtcatgaacaagtccgactgaacaacagatccgaaaaaggagaaggtctcgagctttgtacagcgtgtgccacccaggatccgccctcatcacgccgcccaggccggcacgccgtacacgaccggcgccgcgcccgtcaggaagcgcaacttgcactctgtccgcgccgccgcgaccgcctcggccgtcgacaagccagcggcatgcccaggactgcccgcactggcgtcatcagccatgcccatgctcgcgaggacggcctccgagagccggtcaatgtcgcggtcggtgacgtcccagaggttggcgacgagcgaggggctggcgggcgaaaagggaacgacgttagcgcagacaacgggtacgagcgaaaagagcccagacttaccagcccgcgaccatgtagttccacgggacgcccgcacggtcaaactcgccctggtccttgagatggccggacgagcagccccaaagcataacggtcgcgcaccggcgcaggtgccggatcttgcgcgactggacgtactgctcggccccgccgtggccaaagtagctgcaagagaaagccggtcagtccagtggcaagagatacgcaaggcaaagccggccgacgcacacaacgacgtccttgttctgcagcgcatggacgagctcatcctcgctcggtgcccggccgacgatgcccgtccaacccagggcgtccatctttgtcgtccagggctcaaacgtcttctgcgtgcgggtcaggtcgccgctcgggttgaggatgtaaagcccattggcgcggttgaagagcggccggagcagcgcgccggctggtgaggccgctcccgtcgcagccttgtgcaggaggacccggtcgtcgaggaagtgcgtcgaagggatgcgggtgatcgactggccgcggagcgagggcatcgactcccacgggatcggctgacaatgcctgtcgagaacgaggtagatgttgcgctcgacgacaggcgacggcgtctcgaccgggtggtgctcctgctcctcgaggatggtccgaacgtcgatgacgagctgcgagaccggtgggttcatcggtcagcgggctacatagttgagcgagggttgaaacatcaacgacgcacctggtcgacgtcaacttcggcaagggcgaccgcctggccatgaacctggtagaggtcgagcacaaagtagacgaggtcctcgagctcctcgtcccggctcgtcgatcggagcgtcgcaaagcagccgagcaggttgtcgtcaattttgacctgcgggcctgaacggcgcgacgacgagagggcgcgcgagaagaggtcctcgaccttcgtccggaaggcagcgaacgcctctggcccggcctgtgacgggcggttaaagattgactgatgtcggccgcgcgaccagatcagggaagagtcagcgactcagactgaagtaatcaggctggcagccaatgagcacgcacgcgaaaggcgccgagccagcagaattcaatgttgttgagcagttcctccatccgcttgtcgagcgaccggcgctcggcccaccagtcgagcttgccctgcttactatcgacatccttagcgttgcgggccgtgtcgttgcttttgccgattatctcggcgagctcctcggtcgcgtcactgaaggagaagtgctcttcctcgccctcgcgccggccctggcgatcaagcggaagactaaagacgatcggttcatcgtcggacgagcgacgagagatgaagagcgtcgtcaggtcgtccgagacgttgatcgtgatgacgcagcaactagctggcagcgttgacaccggttgctgctcgagagaagccgcctcgtgtcgcgccgcgatacggccccaagcagtctggccggatggacgttcgtgatcgtgatcggcgtcaatgaggtcgagggtcggaggcgtcgcgtccttctgactaaacgggagcggccaagacaggtcgtccagtcgccgcggcgtcttgttgaggatcgcttctagaagctcgcgccggagggtcacagccgagcagtggtctgtaagggagggcgagaagggagcgtcagtatttgtagaggcccagcgagccttcctaaggcctgaaagtgacgtaccgaggcaccaagacgtcttggtagccaacgggccggcatcttggcccatcgacgtctgaagggcgcgcagtgcgctgagcgagaggcaggcctcgcgaacctgctgaacatggcccgaagcgcggcaatgctcgagcgccttgcaaaaggcctcctctgcgcgtgagagggtgaggttcgcatccttgcgcgccttgcttggccgggccgaggcgccgacgaggaagcccatcgggattgagatgcctgtggtcagcgcggaatcgtcaccatcagcagagcgaaggggtacgtctttgggtcgcgaacgcactagactcggtgagggagctcatcgtcagatccgccttgaagttgtcgagtgcgcggcgaaggatttgccgcgcgtcgtgactgaggtcctccgacttgaaagatgagcgcatggcgcaggtcagcgcgggcggggaaggtcgcttttgctgctttaaactgacgagagtggccgaggtcgaggcgtatgactgcggagagccggacagacgcttgccaaggccatcttgcgcgtttaggccaagcaggaccagagctgcggacaaagcgcctgggttagactctgctcgggcagcaacgatggtccgatgacacacctttctgccgtaggagagtagcgaggagcggcaggtagaccggctcgagcggctgtatagtcgatgcgatcgggtgactgttgttggcaagaggcaatcagtgacggctagcgcctgcgtctcgaaagggcgccgaggggcgcacagcttatcagcctgctcgaaagcagtctcagcctccatcaagagcctcagggcagcgtcgtacgaggcctgagcgtcgccaagctcgtcacagagctccagaatgcggccctcagtccccagcaggtcggcgaggatggcgtgctgatcctggaaaaggtcaaggtagtcagcagaaattgcgatgtgacaaggcatgggacaggaggaagcacctgctgcagaagggcacgactctgctccagaagcgtcgccgcctcgtccgccttgccggtctggagggcgagcaaagcccgccggctcagggctcgaccggccatggttggagagccaccgttcgttgctagatcggtcagttgctgcaggtacaagtctgcctctctgggtgatccacgctggatgagcgtcattgccaaggagagcaggcagttgaggagaccctaggttggtggcgaggtagcccgagtcagtccactggctttgacaggccgcactccacccgcggcgcacctcagaagatctcgcgccgaccgagttgagacgccgttcgatcgagatcggctcctttctggtcgcctcgaccgcgtcctttgagggctgttcggcggcaggtacagccgacttcggcggctcgacctggaacggattctcgagcgagggcgagtcggccggcgtcgcggtcggcttcggcgtcaggcgagcgacgttcttgacgacgctgttccagagccgatgcgcctgcgagagcgaggtagttgccagtgccaagttgccctaagaaagcagcgtccaacgagtcagcaaggtcgccaccgcgtccttttagcctgcagcttcgcagcgagaacagacctcgagcaggtagatggaagcggcggcctcgtgggccatcgccgtccgctcagtcttggccgtcttctcccgcaaccgggcactgccaacgagctttgagtcatactgaatgtccctggacgcgctcagcgcagcctggtaggcggtgacgctgcgagtcgaaaatgacagggcgagtcagtgagcgctcggctgatcgtaccccggcggcagatcctcaccttgcctccttctcgccttcgtgggcgagtaacgtgcaatgttggagcaggaaaacggccttggcggcgggtgtcacgctatagccgtcaatcggcttctcgaggaggggcaacgcggtgctaaagacgatcgaggcgcgcgacaccttgctcaggcgagcgtactcgacgccgagagcgccacatgccatcaggtgaactaaggaggagagatcggtcagtcggctatactgcagtagcggggcttgacgaggacgcactgtcgatgtactgcggcttgcgtagactcaggctgcggacgagcttcagaatctggatcttggcgctcggttcgccgaggaagccgagcaggttggccgtcatatctgaaccacggatgaaggagaccgcggtcagctcgacagtcacactgggtcgacagaccgagctggacgtaccgagcaggtcgaggatgccatccagaccttcgatagcgactgcagcgacaggtgcttcggcctcgacaaccgagaccttgtgccgcggcgtctctgcgaatgggagccaggagatctgtcagcaggcaaattcgagcagcgcgtgggctgatcgcttcgctcgatgtgccacgcactcatcgggattttgggaggcgacttgggtgcgattgccccgcgggcgatgcgtttccgcgtcgtgagcggcggtgcggcagccggttgtctcgtgctgtcccgaagcgccgccttgcgcaccggcgtcctcgccttctccttttcgagcgcagcctcgaggccaggagtcacgattcgaaggaagcgcaggccttcaagcgcgtgcgagaggaccgggccggagtctgacgatgttgcatgcgcgagcctggcgagccagaggtggcctgagcccaggctgagcggcactgcttggaccagcctgccgtcttcgccaaggtcctgcgcatcgagaactcggaaactgtcagccgcaagtgggccttcaagcaaaatggtgacacggcagacggacctgagcagtcgaatatgcctcgagctcagcatcgaggtcctggtgtgacacagactcttcggaagcgcacgtcgccaggcacctgatcttctccgtgacgaccctatgcagtgtggagaggcgtcaatttctccgaccagcttaagagagacatgcctgacgccggtcaaacgtaccgcagtcggcgaaccggatgcgtcgccacctcgtagaacgcttcagcgtcgttgattagcgccagggcgagtgatgcgaccccggacttgccgagagctccactgatgaccgagagctgatactcgagcagcgctcccatcgcaccgtttgaaacgtccgaattgacgccggcgaggagtgcgcggaccgagatttctgaaggcggcaaggcgaggtcgaagtgcgcgacgatcgtcaagcggttgacgagagagaagaggagcacgagcggtggagcctgaagggctacgatggcggcaggcgacaaggcggtggcatgagaggccaggagggcaaaggtcgacgttggaatagacttgacgcccgcgacgtatgccttgtaagcctcctgcaagggtcgggtcaagtgcagcgggtcagctcgaattggctctgctcacggccgatgccggaggtggcagccgcaccgtcttaacctccttcttgagccagacggtgccgaggagctcccagcgtttgccgagctcgctggcaagcgcggtccacggagcctctgcttccgccgcgtcagcgccttcgcgtggaagccgagccttccagtcctgcaatgcctcctgcgcgacagagcagccgacctgaagaagggcgaggccgtcgacggcgcggccctctttgtaaatcttgccgccaaagtggtaggccgttccactgagaaagcgcttgagcttggcgcggtcctcgacgctgagggcgaccgaggtgagcagtgcgagggcacggttgatgagcgcgagaccggccgcgtgcgtcggccgctgggacgcgtcgaaggtcgtccgtgcaagcaggaggagcgagtcggccgacgagtagatgagatcgcacaatgtgcgctgcagagactccgtcatctgcgaggtcgaatgagctggtcagcgctagcaaagcaggctaaagcatcgagcaagccgcatcgcacctcggtcgtttgcctcacggcgttctcggcaaagaggacaaagctgtcgatcatgtccgacgcctctttgcggagagcatcgttcgagcaagtctcgagggacttggcgctcgctttgcgaactcgctcaagcccacgtccaacaggccccaagtctgcaggaggacaggcgccgacgagccgagcgatgacggatcgcgcctggcgcaggtcgggcccagcgtcatctgaggtgccggtggctagtcagtcgtcacatcgagagatctgcgcaaaggcttgtacgagagacgcacaggcatccgagggcgtcttgatctgcgcctccagcttaagcgagacctgtgcaagcacagtcagggcttgcggcacgttgagccgctccttgcgttcgactttccgctttggcgccggcgtcgggcaggaaggaccatcctggaggttgagcgtctgcaagtcgccggcgagcgcgtctgactcggccgatacttccgggccgcaggcagcttcgagaagcacgacgatcgtttggagcgtgtcggcctctcccgccctggaagcgaccgcgcgccagagctggacgacatcgtcccacacctttccttggcgccactcagggcccttgtaggctgaccaggcgacgcgcttggccacctcggtgctgacgcgtgcgtactcgtccaatccaggctcgcacttgccaatgaaggacctgacgaatcgcgtcagctgatcccagtagacggccggcttgagcgtgtggacgagctgcaaaatgtcgagtgcgctcgagcgcgagtcgaagatcgagatggcggtcgacgtcggcgcggcgggcggtgacgacagcgcacggacgagcggcatgagcagcggtggcagtgtcgccggcgggatgaccggggcgaggaggtagaccgacaaaaggagagcaggcgctgccggatgaagcggcgcaagcgaaaggagggtcgccgagtaagagagcaagagattggctgtcgccggtgcgagagcagagggctcgagcggagccggcagcggcgctggcagaggcgtcgaggccgagctagtggccttggcggcggacgacacggaggatgctgccgaaaggatgcgtctacgcgctggcgtctgcagtacggccgaggcggctggcctagtgacagccggcgtgctggtcggtacaggcgatggcgaggaagcgtacaggtcaaggatgatggatcggctctcccagagcagcgccagggccgcctccttctgtcgagcgagccgagcatccgctctcttgtcagcagcagtcgcaacctagcagaaagacaaaatgatagactcacagctccaataatccccagccgaccggcgaggcccgtacaggccttctcgacgccgacgcgctcggtctcccttgtcaggcctctccgcagcacgtcaagtgccaggcccgccaggccgacgagtgtgccgatggattccttggaagcggcagccgtcgcgggagcggcgagcaggctgagaagggcgttgacgagctgcatgcagagccggatcgtctccggcctcggcggtagggctggcgtcggaggcggcgtcgggagggccgcctcggctgtcctcgtcctagcccggctcgagcctgccgcagcgacgggaggagcggtcgccgggactcgcgtcgatcttgtcggctttacggcaggcgtcttgggctcagatgccagaggagcagtcggaggcagcggcggcggcggctggacgagagcttcgaccgacctgagcaggctcggagggagctcgccaaagggctcgcgcacggcgagcgctgccaggacctcatctggcccgagcagcggtccagcggcctcggacttggctgccttttgggcaaccacagatgccttccgaggcggcatcgcgtcgcagcaaggaagagaggaagagggcgggcgggctggaggacgaggagcttgttggtgtgctcggcggaatcggacgcgtccgccgcgtctccctcttcctcacgcgtccggttctcatcagtctggtcgctcggcacgctgacctgctcactagttcgtctctcgaaagcaggatgggagtgacatgaagtccactcgcttctgtatgaagtctctgccatgccctgccgttgctgcccctgctctctgcccccccgcgccttcacggcgcgaaaacatgagacgggtcattcttttgcgagactgcgggcaacgatggagtcgaggggacgctacaagtaggatcagaggaaggccggacgaggatgggagggtatgaattggacagaagaaggggaagcgggggagggggggaggaggagccgctgccgtgggcatcgcttcttgtccttcggcgactgtgcgatgaccgcatcagaagcgcgagaggtacagcgcgcaaacgacgtagccgagagtgactagaagggacggtcagaaacgggaggagtcaaccttcgctcaaaagccagtgcgagcgcgccgatgaagagaagatgcggacgtacggggtggcgtcagaatgccgtacgagatccagattgtcttggagatgaggctctcaaacgcgtcgcccgagctggcctgcgtgatttgagcgagcgtgatggccggcggggacgagatgacgaggacggcggtcgcgatgaagacggggtcctcggcgacctcgaaggggtcgtagacggcgagcagggcgacgacggggatgagaagcagcggagtgatgatcatgctggtggcgggcgaaggaaagacagagcgataggtcagcgtgcggcccagttcaaaggcctcccctcgctcgggcaaggcggagaacagagcggatgagggcgacataccgcgaaacgacggcgacaaagatggtgcgcttctcgccgggcgtgctcgccttgcgccgcaagacggtctcctcgccctcctcgccggccagctgaatcgcgccgtgtttctgccggctgaagggccgcttccaccaagcgacctgcttgccggccgggttggtcaggccctgaggcggcgccaccttgtcgggcccgtagaagtaggcgccgaggacgatgagcgtgatgggaactgcagaagggagaataggaaggcagcccgtcagtcagggatccggccgaaggtttgactggccatgacgcactcgagcaggcgccggaagacttgatggccgaccggatcggccgcagcttggccagctcgtgctgaacgggcggaaccatggcgatctgtaaggccgagcagtggtagcatcagctttgttcctgagcgacgggacctcacaacatggacgtacggcgatcgaaagaagggccgaccacatcgggaccgtcataaactcgttgacgacctttgtccattggcgaagagtccgaacggcgcgcttcatccggctcccgccttcgaccttggcctggacgagccgcgcctcccagtcgtcgttgtaattctcgttgctgtcctcatcctccgcgtcgtcctcggccgaggcaggcaaagcgcgccggactgacgtcggcgagttggggaacgaatggaagtctgacggccggcgcgagagcttgcgccgcgggccgttgcccgatgcagtcgtcgagttggtggacgaccggcgaatgacgtcggccgcaacctgctgcgggacggcgtccttccacgggtcctcgtcgtcggtcgacgagccctgcgtatactctgagcggtaagagatgcgagaacgaggtcagggcgagcgtctaaagatttgaagtaatcaggagacgcactcatcggccggccgttggggctctcaggcacctggccggcagtcgtcgtcgactcgggttcgtcaaagagcgtgctgccctcgacgctcgctcctccagcgacgccgttcgaggtgggctgctgctgctgcaaccggttggccaagtcgcgtccaagaagctcgccccgctcagcctcggacgaggcgggcaggacctcgtcgtcggccatcgtgagcagtcggacgccaaacgaccacctgagctgaagggacaagagagtagaggagatgccaatgggtcagtcgagaggccaacggcccaagggcgggtgcggactgaccatcatgccgagcgtcgagtacaggacaaggtaagtgagtgcccgaccgagcatcgactcccgcgtgtcgtcggcgtcccactgaagcagaagcaaaagaggtcagctcacgcacgtgcaagtcttcgtcgtccgccccgaggcaaactctgtaaagcgtcacgcactttgagacccgggacctcgacgacgagcgactgcatgagtgcaatcggcagcgagttcgagttcataaagcccgaagcggccatggcaaacgccttctggctcttcttgagccggaagacggtgcccatcgcccaggcgacggccatcgaggtgccggtgacgacgacaaagccgagcgggacgatccagagctctttgatcttctgcgggctgagcgagaaggcgaccttgctgaacactgcggggaggcgggacgagggatcggttagagtggctcgaaagaatcgcaggctgacgcgatcagcatcgaagacgcacgcagacaaggcgtgaagagcgagatgttgagccggttgagtttctggagagccggcaaccggtacgaattgggcgagacgagcgagggaggcaacggaaggggtcagtcggtgatcagtttcgccgcccgatagaaagccgaggatggggccacagctgcacatcgctcgcagggcgggtcgcgaaagggtgggagatcaggacgcacacgctgagtcgccttgtcggtgatgcctgcccgagcaagcatgagaccggcgagacatctgagatgagcgaccgaggaacgggtggtcaaggtcgaccgaggcgagaggcgaggcaggcacagcgagtcagctccatcgccttcttgcctccgggcggcgaccgccacgcctcagagagcagtccgataaggccagaagcagacgaacagtacaaagacttcaaggatcgactgaggagcagagagagatcggtcagtctacgcaagggctggtgcggctgaagggggagcgccaagacgaacctcgaagacggtccggaggaggtcgctcactggcggcagaggcagcgtcagcgaggcattcaagctgccgtcgtcaactgctggacgcacctggcacggcgtcgtgcatgcgagccggggtttggtatatggagtgcttgtagaaaggcggtcgacggggtgcagtgtagggcgagcgagacggggcggagagactgcggcttcgacgtcgaaacggctgcgttgctcattcccccgatcggaattgttaagaacccaaattgggcgggcaactcatctaggtcgcgtccgtcgccgtggccgccgccgccgccacacgcgtcttgacactcttcgacgaccgtcttcctctcgtcgacctccaacacaagcacgcgcccccatgcgcacagctgaagccgtcattgttgctggacgccactgctccctgtctgtccgcacgtcccgcatcgcctcggtaattcctgcccggctcgagcttgaacaccggcgcgcgcggagagagagagagggaggagctctagctcagctcgagcctctgctgctgatcgcaccttaagttcctgccgtcaggatccaagatcctggcaggggagacaagatgccggtatgaaggacgcgctgctgacatccgatccaccttctcttgcagcgcctgaccgccgtctgccacaaccaccggctctcggtccctctcgcgtctcgagccttagctaccgacaccgcgcctccgcctctgtcgaagcccccggtctggcggccacctgcaagtagcagcagcagcagcagcacatcctatcgtcctccttcaggtccttcttcgggcccaccgccgatgaccgcgcctcagactggatcgcacggggcgacgccgaaccccaggccgtcggtcccgcagcagtaccaggccaagccgccgtcgactcagtactttccgccagcctcggctgtccacagctcggtcatgccgccaggaacgccctttcagggacaaaacacccagacgtacctcccctctcaggctttcacgccgacctcgttcggcgccggctggcagggctcggtcctctcgacgttcggcgccgacggcccgccgacaggcgacagcgctcggatgatggccgccgagagcctcgcggcgcccgggtgggacacggctcgacagatcgctgccctccaggtcaagctcgaccggcagctcgggcccgagttcgtcagccagcgggctggccagggcggcgctaagtttacctacatcgagggctggaagcgtgcgtgcagcgattgtccgtcacctcctatgcggtcctgacctcctgacctctgctccgcgcagtcattaacatcgccaacgagatctttggcttcaatggctggtcgtcgtcgatcctcgcgctcgacaccgactttatcgataccgacacgtcgggcaagcacacggtcggcgtcacggcccgcgtccgggtgacgcttcgcgacggcgcctaccacgaggactgcggctatggttcgatggccaattcgcgcgacaaggcggccgcgctggaaaagtgcaagaaggaggccgtcaccgacgcgctcaagcgggcgctccggagctttggcaacgttttgggcaactgtctttacgacaagacgtacgagtcaaagatcaagactgtcaagacgcagccggtgcgtcccttgcgttgtgttctctcttgatcagcgctcgtctgaccgcccacctcctctctcgcaggccaaatttgatgaaaagacgctctatcgccggcccgagttcgacacctacaactctcgggctggcatcatcactgacccgaccgtccccgcctcgcattcgagaggagggatgggctcgcccgatcctttcgcgacacagggctcgactgcgccaggcggaggtggcagcgcagctagctcgcccgggcccaaggcctggcaggctaacggcgccggcggcggtggtggcggtggtggcggcgccggaaacgcgcctagtctagtccggacggcgatggccaacgccaacgcgcacggcggcaacttccagcaacgcgccgcgacgacgatggcgccgccccaggtcgctcgggcgcagacgacgccaagccggccgccccagaagcaggagctgctcgctgcgtcgtcgtcccagcccgagggggtgagcgagatggacctctcggccgtcgatctcgatgcgagcgcctacgacgcgtatgacggcctgcgcgacgatggagccggaggaatgtactctgctccgccgaccgctgcagccgccccagcaagagactcgcattcggcgccgcagcggcagcagcagcagtcggcggccctgaagccaagcgggtgcgcctccatcctgccttcagtttcgtttgctttccatgctgacgcgtagccttttcctttcagcggcccgcctccgttcaagcagtctgcgccgccgtcgacgacgcccaatcccggcgctgcggcgcgggcggcctcgatcgcagcagccggcagcaacaaggttggcggcttcagcttccccggtgccgacaaggtgcgttccacacgcttagtcgcctagagaggctttgctgattaggcgttatcccggctgctcagcctcatcagcaagccgacggccctcctccgggcgtcaatccgggcgcttggaagcgccagcagtcggtcctcaacctcaaccgggcctcgtgagtcggctctcttgcctctcgctgactcttcaggcgtcagcggtgtctttgcctgcgtgccatcggctgacgggtgtcttcccattctgcaggaccggacgacccctttcggccgagctcgagagcgtccagggttctggcgggtcggcgccgaagcggcagaaggtcgagtacggcggccagcaggtttgaaggagggccaggaccacctgtttcctctttacctttgccgtcaccacctacatatgccggctgtccgcgtcccgcaccaggaggacgacaggattcatcactttatgccgtaccgcacctcacctctcttagctttcctccttgttgtaccgcccccgcccggctcgggcccgcttgcattgcgcgcgctttgcaaactctcactcactctcacgagcatctgatgacccctgcacgcaatctcctagcgttacagcccattcgaaatagaagcatccagctttcaggagcgcgcggcgtcgtcgcccgcgaaggcccagcgcttgacgctccagccggccatcccgacgccgcggacgttccattggccttcgcgctcttgctcgcggccgtctcggtcgactggagagggcggtcgagtcagtctccttaagcacagctggacggaagaggacacgtactgcaccggacgacgacccaaccgtcttgcaccgctcgccgcgtcgactcatcgccctcgatgcgactcgtctcaccagccttcgccgaccaaagcacccagccccactccctcccgtccggccctgcgtcctccaccggcccgcgctcaagctcggccgactgccaggtcaacgctggtaggcgagcggcgagcgtccggatctcggtcgcactcgggtcgcgcggcgggtctgtcgcggtcgagcggtcgatgaaggcgacttcgacgcggtcgagcgggacgcctaccgtgcgaggagagcggctcgagcgtcagatggccggcgagacttcgaagaaagagagcgagttctggatcgattgaccttctgacccgatcgcccagcccttcgcctcgcccgccgacccatcggcgagcaaacaagcgcagctgattccgaacgccatgagcggctcgaccttctccatctctcgctccttctcctcctcggtcgggtcgacgatcgatgacgggaggagcttgtagtcgtgcgtcataaacgagttggtcgactgaggcgcgcgcgcaagtcgatgtcagcctcgggtctcagttgctcgaccattttgatgccaaggtcttacgggatagggcaggatccggatccgctccagccatttcacgctgcgagcgccgatgacgcctggcgtgacaagccgaagcggtgcgccgtgttcgagaggaagcggctcgccttgcgcctcgtacgccaggaggtgaggagcggccgactcggacctgggcgcgggaatgtcagtctcgggaggacgaatactgtcgccagaaaggaaggcgtgcagcacaagcttctaaaccggaggacttacgtgaccgaagaaaacggcaatgagcagccgtaccaggcgtcggccttgccagcctcctccttcggcccgacgcccgactcaaagtggacgtgccacctgcccttctcccctctcggcacaccgtccgggacgccaagctcgagcaggacgtcccggacggacacacccgagaagaggtggttggcgatcgtcccgacgccccaagggaggccctcagttggccggacagacgagagctcgtcccgcctgttgccggcgcattgaagggcgaccctcgtcttgcgctccttgcccgcccaacgctccttcagctcggcgaggtcgccagaccagagctccttctcgggctgctcgtttgagtcgtcgttggcaagggccgagctgatggagagctgccagatatcgacgaatgacggcaaaggaaaggcggcgtgattcctccggaaggctgggccgaggggcgtgtagaagccgacggcgaggagcgtctggggcctgggctcagagttgtctggcgattgctcgtggacgatctcgggcgaggaaggcggcatggcaggaggaaggagacaagaggtcgtggtgagcagaggagaaggctggctgcgactgcgcgaaccgatgccgatgacgccgcggccgacttgccggagcagcttactcgacctgctcctcctgctcctcgacgacgaccgctgccagggtaggaagagcagccagttgcgactgacgaccaacaactgaccatccgtagccatcccgaggcacgtgccagcgggcggcgcgctgcctttagccttcatcagccagggcgggcggctccggccccgttcccttcagccttcggctcatccctttggcctcgacgcgcctcctccgccgcgcatctcccgcccggccgaccggtcgcgccctagcgccgtcgcgtcgcgtccagaaccgacaagatcatgtcaggcgagacggctgcggccatctttccgcgaactgcaggacgcctcccttcacccagcagcgtcgacctcccggccagctcccgtcttcagcccacctctcctcgccgatccaccctggcctcgcccggatctttgctcactctgctcgacgcgtcagcttccctccacagagccttgatccgggcgcgtcgccgtcgagcgccctttgtcccgcttcccgggccagggaaggcactcgtcctaccacctaggtcatcccacctgcgcttggctcggcccggatctctcggaaggcgagcggtgcgacgtctggctcgcttgatcgaaagcctcaagaagcgacggtcctgaacgccaccggggctcttcttcttcccctctttcccccttcccttcgcctcgttcgcctccgctggcgtcccatcgcccctccatcgcgccatggttgacaagccagccgttctctaccgctcggagccgtctgccaagaggcaggcgtacgacgcgtatcagcgcgacctctgtcatgcagctgccaactacgtgcgtgattgtcactcttccctcccgccgctgtcctgtcggctcacaccgttgcttccgtcccgtcttcgaccagatcaccgcgctcttcgaccaagacgctgtgacgggccactcagcgccagaagcagccggcgagctcgcgtccttcgtcacccgcgtcgtcctcgccgggtccatcccgcccccaatcctgctagccgcgctcgtctacctctcgcgcctcaaggcccgctatccgctctcgactggcgcctcaggcgcccgcctcttcctcaccgcgctcgtcctcggccagaagatcctccaggacgggccatattcaaattggacgtgggtccggctcgtccgcggccactactcgctcagtgagctcgcgtgtatggagcgcgagctgctcgccttcctcgcttgggatgtcgccgtcgaggtcgatcagctgctggcggtcgaggtgaattgcgtggacgtctttggcccctgcagaagattgtcactgacaaaacctttctgcccacttttcgcaggacctcgtcatgacctactatcgcttcgcgcagcagccggcccctcggatgtctcccagcctcgcccagcggtcaaacgtctcctttccttccgtcacgacctcgacatcctcggaccttgcgctcggtgacgcctcgggatcggcttgcacacctccgacggcgcaggcggtcagcatcccgcttagcgtgcccaagccgttgtcgacgccgccaaagacgcccatcgtctgcctgacgtcgtcgcctcggccacaagtgggtcaggtggcagcgctacctgcagtaggatccttacagccgatcatcgacggcacgcccgcatcggatggccggaagcaccagcgccatcggcggactgcttatcatagccgggccgatcccagcaccccagacgcagcccgcaagacgtatattactcgcactgccgttgccctcccttcgacagtctcgcgatcgaccgaccggctccgcgtcctgagctcctaccggccacctgcgcctgcgtcgccactcgctcgaccaaccgtcgcctcccggtcgtcgtctgcgctctcgagcctccacacgaccgccgccgcctcgccagcggcaagcctagccgttaacttctcgcgcccgatgagccgagcatgctcggcagcgaacgtcgcgcgcctcgggatggcttcgcacgatgtcccgcgtccggcaggtcgcccgcgcctgacggggctgcatgcgtcgcgagacgaggtcgccagcggtggctcatcgtcctcgtcgtcgtcgtcctcctcggcgctctcgtccgcactgccatcgccggcagagggcaagcacgactcgcaccaggtcaagccgaacgcctttgttgcatccgccaaggttggcggcatgtttagctttggcctccttcgcggctggcggtcggccagccagcccatcacggccgcctaagaaaagtcgaccgcggcctacgacatcttccctcatctttcttcctggtctgcgctgattccggatcttgtacgactgtctcctgctcccctcccatgcctgtaaaagcctcctcgccagttcttggtgctcatcttccttcacgtagtgctctcatctgcgttcgttcctcctgtgcccgtctcatgactatctcacgcccgtgtcgtctcgcaagcagcggcatcgatcgccctcagatgcgcccacgcgccgccgccttctcctcctcgatcttggccttgtactcgcgcgtgaagcgctcgacgtcctccttcgtgacggtcacgtcggttccaggagagccaaggccctcaatgtactttccaagcgcacggccaaagtcggccatgccgctcagcgcgtgctggacgccgtcgaccgcccgctggtggccgaacgtcgacgttaggagcggcatgagctcggcctcggtcagggcccgtcctggcggcggacgagcagcaaaggatgggatggcaagcggaggcggctgccacgtctcctctggccgaccgaagagggccggcaacatgtcgatcaggggggcgtgctgcgaggcaggtggaggagacgtgtcagtttccatgcacatgcgatcgcgttagcagcaaaccgacgcacgacgtcgcaacggcagaggtcgcgccggaagcccggctggacaaagagatcgcagcggcccgtgccccagccgttgtgacctgcgctggccgtctttcgccgttcgagcagcgccaccgcccttgagtctcgtgcggcggccgagagggtgcatttggatgccgacggtgacatgcgggccttctttgctgacggagcagccgatggagagctggggagtggccgcttcgacggctctgactctggcgaagcctgcgactgaccaactgtcggttgcagtgcgggtgtctcgctcggcccggtgccggcgccctcatcgtccgtgtcctcctcgtcctcgacgccttcaacaaagccatcccggtcccacttgccgccctccccggcgacgaggccggcaaagcgcggcaggccgtagtagtcggcgagaggagcgtgctcctcggctaggacgcacgactcgcagacgagcgcggcatactcgccatcgcggagcaggacgcccggtgcagaggggtcgtctgggttcaagttgagggggaggggaacccgcgacggctgcttgagattgagatgtgtctcgtgataccactcctgcagtgtggcgaggtgtcagtgcgggttgtcgggcaaccggccagagggcgagaagggacgcacctcgcaaacgacgcattggatcatcgtctcggctgcaaaccgctcgtcgccgtacggggtcgagcaccagcagaagaggttgccaaagttctgaccataccggttctcggcgttgggtggcagcttcgacgcgccggcaaagatggtggcgagctgcgtgcccgcgtctgcagcgagcgagcaagaggccgtcggaaaggtggcagttggacagtcacaccggaaatggcgctttgggtcaaccgggaagaggtcgtgacctgtcgacgagtgtaaatgcaggtgagggtcagtacggcaggtcgggcgccgccgtctgcacgagctcacgcaccctcgtggcagctgttgtagcagcagacgcagaggccaccctcgacagcgcacgtcccacagccaaagacctggcgacaagcagggggagcgaagacgaagccgaccaacgtcagctccatctgccgcgagccgccgcggggacgcgacgaccggcgccatcgcgtcggtaagagatgctcacctcctgcttgatgtagccgaggtcgtacgagcatttgctaaagtcgcgctcgacgtcatcgtcctcttcagcgtcctgctcggcgagctcgcgggccttgtgccacgaggcatactcgttccggagctcgtcgaacgtatatgacttggccgggtcaaggttcgcgccggcgacaaagtcagggtcggcgaggaagtcgctcgaggtcgagacctcctggcgtgcagcctgagcggcggcgagggtaaagaggttgtcgaccatgctctgcaacgaagaggggcgggtgacagatggggtgagggtcgagaggagggccaggagagggtcgacgtcagcgaagcgtgaagcgtgtcgtcgacgcgtcggcacggcgggtggggaggaggctgccccgagcagtagcggcctcctcctcaggcctcctagagcggcaccttctctggcaagtagctggggagatttgtctacataggccgagatgatatgctagggtgaccatctttgcatcgacgctgtatgggcaccaaggctacacgagctcgaccagcttggctgccgcggcggaggcggacgacacgtcgggctgcctcttcggcaccctgcgatgtgtaacacggcatcaagtttcttgttcgagtgacgagtgcaagtcttgatctgttctgtcctcctggcagtcagtttcctcaacatcttcatccaaagactcagccggcttgagagccgcctgctgcgcgctgcctttctctcgcgtcgcgcctgacttcgtgttgaccgactcgttcgtcccgcccgaccgcgaccttcaagaccttttccgccagcctcaagacactctacaacctccagcaaccgctggcacacgatggagaacgttgttagtcagctggatcgcacgtcctgccacagtagctggttctgaccgtcgcgacgtctcgctcctccctctcgttctctccgagccagccgccgacatcccgcctgccgaccatgcttcctcggccaacgtcctcgcccatcaaggcccctgatgcctcgtcaggcccagcaccaccgatgccacctgctcccggcttccggccgacgtcggctgcgtccgcgacccgtcctctggccgcctccaccaacctcggcccgaagcgcaaggcagttgagcccccagtcggcgcggccacggccaagcgaccgacgcctccgcccactgttcgccggccgccaggctcgagcacgattagtggtggagtggcaaagcgtgtcccagcctcgtcgctgacgatgtcgatccgcgaagtgcgggcgacgaggccgctctctgccggctcgtcggcgagctcgacgagctcgtcagccggagccggagccggagccgctagacgggcagtcggagcgctcgctgccttaacatcgcgcggaccgacgacggcgactcgagcaccggtcggccggaccgcctcaggtagctcgacgggaaggtctgtcgtcggccggcggggcgtggccgaggagcccgcgtcggcgtctgcccacgtcgaggagcacaacagccggattaagaacgttgagcagcagatcggctccatggtcgagttgctgaatcaggagcgcaagacaggttagtcccatccgcactaaattcaattcacgagtactgacccgccacacaccctctccttctagttcaagagctctcgtccaaccaatcaaacctacagacgcagctgtcgctcgcaaaggcggccgagacatccgccaaccgcgagctgcgcgagtcgaacgacgagctccttcgcgagaaggccctctgggcccgggatgcggctgaccttgaccgcgagcggcgcgaccggatccgcctcgaggtcgaggttcagtcgcttcaggccgagcggtcacgtctgctgcgcgactcggaggacctcgaccgcgagcgccggacgcgacagaacctcgagcgtgagcttgaggagggccgcgacgagatccgacgcgagcgcaaggagggccgcgaccgggaggaggagcttcggcgggaggtcacgcgcatcggccgcgaggagaaggagcggagtgaggagctcgagctcgagcgcgacggccggaagcgggagagggccgagattgaggccctcaaggtgcgttgccggccaagccacgttagcccgtgcacctgctgacggcgacggctgcctctttcttaccgtccgcagtcgaagctctcggagatcacaacgtcgactctggcgcagtcgacccagctagcggctctgcaggcccagtactcggccctgacgcaggagctggcctcgtcacaatcgtcgttctcgtcgctgtcgtcgacgaccgcgctgcagctgcaggacgcacagcgcgagctgctcgaggccaagcagaaggtccgcgaggccgagaccgagcgtcgccggctgcacaatatcatccaggagctcaagggcaacatccgtgttttctgccgcgtccggccgccgggtgcgttctgcttgacttgcccgtcgctcttgcacctgatcagcgactgatgccagccttgtcccttcggttttcaggcgcgagcgattccgtcgcacgcatttcgtacgccaagggcgaggagggccagtcgcagatcaccatccaccagtcgtccgagtcggccatgggcgaggtccgcgaccaggcgatcccgttcagctttgacaaggtcttcgaacccaaggccacgcaagaggaagtcttcgaggagatcgagggcctcacccagtcggtcctcgacggctacaactgctgcatctttgctttcggccagactggtgccggcaagagtcacacgatggagggcggtcaggtgcgtccctttcccccgctgccccaagtctcgcgcggcgagatcctgacctttcgttggatatcagacccccgagagcgccggcatgattccccgggctatcgagcacatcttcacgtctacggccgccctccgcgagcagggctggtcgtacgagtttgagggccagtacctcgagattgtgcgtattctgcttcctgctactcgcgatgctgtttctcagtctgaccttccacttgacgcacgcttgcagtacaacgaacaggtgaatgacctgcttggctctggcgagatcgacaagaagaagcacgaaatcaagcacgagaaggtcggcaaggtcatgcgtacgacggtgactgacgcggccatcggtgggttccctttgatgttcgtcttgcccagaaaggctgactcgtcgctcacctctcttcccttcatcagtcaagatcaagggccccaaccaggtccgcggtctgcttgacaaggcaaagagccggcgggccgtcgccgcaacgctcatgaatgagcgctcgtcgcgctcgcactcggttttctcgctccgcgtcatgggctccaacagtctgacgggtgagtcgtgcgagggcgttcttaacctcgtcgacctcgccggatccgagcggctcgcctcgtcgggcgcgggcgacaacaaggaccgactcaaggagacgatcaacatcaacaagagcctgtcggcgctctcggacgtcattggcgcgctcggccaaggcgggcagggcaaccacgtcccttaccgcaattcgtacgtcaagccgccccaagccgtcatgcgatcgcttcgcgctgacacgttgctatctctgccgctccgtcaggaaactcacatacctgctgcagacctcgctctcgggccagagcaagacgctcatggtcctcaacatttcgcccgaggtggcccacctcggcgagtcgctctgctcgctccgctttgcgaccaaggtcaactcgacccagattggaacggccaaaaagcagagcaccaagtagaactctcttcaattctcctctctcttttcgttccctttccttcttgcagcttcgccttcgcctccctcttctttttttgacttctgccgtacttccctcttccccgttctgctcagccactgatctttgtgtccgtcgagcccgcatcgtggcgctccctctcctctcctccttttgcccagctcatctcgcatgacgagaatcttgtctgctgtcgtgcgcttgaaggccggaaggctccggtcgaaagagtcgtgaagtcatcaagaatgggcggaagagaaaggggcatgaggaggccgagccgcgtgcagggaggcaggcggccggccggtggcgagaggagtagccagctcaggcgatgccgagcttcctgaacgactcgcgctgggcccaggccttccagtatgcctcgacggcgtcgggtatgacgccgccggtggccttggcgagcgagtcgagcgagccgcccgagccggtgacgacgcgcgcgagccaagcggcggcatggactgtcggaaggaagcgcgaagggatgtcaggcaacctgcaaacgagacgaggcggcagaacaacgcacagtcagcctcgccgggcttctctccgctgtagaaggcgcccgacgccggcttgtcggcgagcgacttggcaaacgtccccgagaggaagctgccgatggccttccagagctcggccgacttcttgtagtactcagcaagctcgtcgtccgaggccttgcccgagtagatgctgatggaaggggtagaggtcagcgatcgtactcggtcgactctacaagctgaatgcaacgcactcgacaaagtgctgagaccaaggaccaaaggcgacgacgaggacagtgtcagccatcacacggaccatcggcgcggcggccgagtcagcgacgaacctggttgtacttgatcttgtcgtcgtagaactgcttgagctcagccggcgcggacgcagcgtacttctcgagcgcggctgccggattgaggtccgtcaaactggtcgtcagccgccaagactgggctatggaacgatcttggaaggaatatacccttgcgtccggtccagtacttgcccgggatgtcgttggccttcgccttgcgggtcgcgtcgtcgggtgagctgcggagcaaccagggctgtcagccaaccatcaacgagattcgacgcagagcgagtcggacgcactagccgaccgatgcgtcattcgggtcgatatcggaacttcaaagctttcgacgtcaggctcggcccggcctgaagaggggagtggacgaatagacgcacgcgtggaaggcctcgacgatctcgggcgtcgccggctcccacgactcgggcttgcggggcgcgtttgcgacgaggtacttgacgaccttgacggtcgagtcgaggacctcgccctggaggtcgacgagcgccgggaccgtgcccgtcggctggaccttcaggtaggacgggttgaagttctcgccgtcgaggagcgagagcgtctgtgcgttgcgatggggcgaaggggtcagccagctcgcacagtcgtgctcgggtcagcaatggtgaggtcggaactgaccttgacgttgaagtccttctcgaggtcgtagccgagctccgcaatggcgagacgtggcgcaccagcccaagcagagccatcgaagctgaagagcaaggacagggagaggacgaggtcgggacgtcagtcgcagctccggaggcatggcagcggcggccggccggcagtcagtacggacgtgtagaaggtgggcttttcgtcggacatggtaggaaggcaggaggaggttcgtgcgagttcggtggtcgttgatgtcgaagatgcgatgggcctctcccttttcaagggtcgcacgcgtctcctgcagccgagggccggccgcgtcagctgctgcgccccgctcggctgccgacagcagctgctcggtcgccgacagcagacgtcccgacagcttgcttgctgacgcctttgccgctgcgataagcgtcatgcattatcggcccaaaaactgctcagtcgccgactagtctgcaggacgagactcgcttggttactcgcgcttggcgggacggctccttgcgcgacgctggttacgaggagaacgcgcgggccccgaacggtcgaacgaatgttgccgtcggtcggccttcgagctgcgagggcggaggactttcaagagtcgttccggctagcagaccaatttcggacgcgagatgcttcggcagggagcggaggagaatgtagggctgccttaacccttctcagtctccctgctcaacgaggacccaacttgtgctgcatccagcccagacggcgagggggcggcctcctggaccgacgtccttcgccggcggccagacgcacttcgggttggtcccatcgaccgtcgacccatcgccgaggttgccgtgctcgttccatccccaggcccagacggtgcctgcttgcgtcagggcgacgacatgctcggaccccgtggcgagaagctgaatgtcgacgacgacagactcgtcggctccaagcgtgacgacgcgcttgctctcgccggcggtgagggccgacgggcggccaaaggcggcggtgcgcccgtttggcaggcgataaacgttgtggtgccaggtgctctgaacaggcgcagctaaaggggccggtggcggctcgtgcaagcctgcattggtgagcgcgcctccgagacggatgaccgttcctgaagccgagaaggacaagaccgagtgcgcaaagccgagcgcgacgaccggcgcctgatcgatctcgacgtgagggtcgccggcatacaggacgagcgacggcgtgtctgtagtaacaggatgttttagcgtagacagctgcccgtcctcttcacctgttggacgctcggcttgcctggcgagttgtccgtgtcgggccgcaccccagccgaggacacgccaattagcgtcgtcgccgcccttgaggacgagcatcacatgccgcggcccagcctgtaggtcgcccaccgcctcggcgtcaaagacatgccagtgctggcgggtcagcgggatggaccctcggatgcccgagccgagctcagagaagtcgttcgagccgagcgcaaggacgagcgacgtcgcggtcgtcgagcttggtgacgacggcgcgcgggcgaaagcgacgaacgaggtcgtccagctgcaggcgacgtgggtcggcacccaggatcctacgaccggcggcaaaggcagcgtcaagcatcggaagccgtcgtccgtctgtgtccagccgtcgccgagctggccgagctggccgtcgccgcagccccagacctgccagcagctgtcggcctcgtcggtggtgcgaaagaggccgactgtgtgattcgcgccaaaggcaaggtcgccgaccgctgtcaacccaagcggagtcaagcatggctgaaaggacgccgtgtcctccctgcccgagtggccaagctggtttgcgccgtttgagccggtcgagagcagacggacgggcatgggcggcctgctgcgggtgaggaagggcggtggcagcggtcagcgccatggccagcggccggaacgagaagtgcgccgtccactgacctcagccagtcagtaggtagatgagcgcgtgtccgtcttaggggaccctcaattgtgatggcaagaggcggatggccgttggatgggctcgacgacgcctcccgccagctcgactcgaggcccgatttgggacgctcgcctgcccctcgaccataccctccgctcccgagctcctacgacaacttcgctctgatggcctcgtctgctgcacagccctcgacgttggccaagcggtcgctggagacctcacccgaggtcgctccagccggtgaggaccgcgaggcgcgtcgcaaggccaagaagcagcgcaagctcgacatcaagcagaaggtgcgccagtcggtcagcgagctccttggctgctcctggagctgacctcctgcatcatgcggttcaggcactcgtcccgagcttctcattcgccatggagggcttcaagggcggcaagaagattggcatggcggtgcggccgagctgttctgactctctctccgactcttgtggcccgcagctgacaggccgcttcccgctcgcttcctctgcagcacctgcgcgacctcgtcctgcacctcgtcgccggcactaaggagcccaattggatgtttacggctcaccgaacgtcgctccgctcggtcgtcgtcgtcttcctcccaggcgtcacgccgggtctgctcaacctgccgacgccgccgccctcggtgaacatgccgatcgcgctcccgtactcaaaggagacgcggctgccgatcatccaccagctcttcacacacgccgcactcgtccgcgcgccgggcgacagcaagcgcatgcattcggccctcggcaccttcatgtcgtgcccgctcgacgccaaggagaaggagcggcgcgagcgtgagcgggcgagcggcgcgcacaagtcggccgacggcgagcggacagacgtccggacgtttgtcgttacgcagcaagacatggaggaccacgactacccgcttccgttgcttgctcacccggggctcgaggtcggcgccgaggctgtcgaggacgcgggcgaggtcatctcgcgaggcgcgccgaggcccgcaaaggtcgacgcgcaggccgagtcgcaggcgtcggaacgggcggccacctacaaggagacgtacggcgccaagacggggacggagagtgggctcgactgggtcgagattgcgccgctgtcgccggcgacgctccgccgacaagttaaggtctttgcgatcgactgcgagatggtccagacgacaaacggccaggagcttgcacgcgtctccgtcgtcgactgggacagcaagcaaaagatatttgacgagctcgtcaaaccgtccggcgaggtcaccgactacctgacgcgctggtctggcatgacgccggccaagctcgccaacgcgacgcacaccttgctctcgatccagaagtactttctcggcatcctctcagccgcacctggcgtcctgcttggccactctcttgagtcggacctgcgggcactgcaccttcgccatccgtactgcatcgatacgtcgctcctctacccgcatccgcgtggcccgccaatgaagagtggcctcaagtacctcgccaagcagtggctggggcgcgagatccagagcggcgagggcggccatgacagtgaggaggacgcccgagccgccggcgacctgctcgagctcaagtgtgccttcggtacgtcgcgtcgctcgcctgtgttcctctcccgagccctcagctgacgctgtcatcggcctgcctatcaggccccgagttcggtgacccggcgaaagagaacgagccgctcttttcgaagatcgcgcgctcgttcgctcacgagcagaacgccgacaagcagcagcgaacggcgctctttgaccggggcaacccgaagcggtacctcaaccggacgaccaaggtcgacacgctcgccgactgcgcttcagatcaggatgtgcgtcccgaccgtgtcattatctgcgatgtcattacctcggctaatctgccccttccgcatttctctccagatcgtcgacaagctgggcgaggctgcgtcgagccacaacttcctgtttggcagaatgactgagctttcggaagtgctgggctgtgagtggcggcgcgcgcgaccgagcctcctcggccgctgcagctcgctgacgagcgtctctgtttcacagggtcccggcgcaatgttcccaagggcggacccctgacgagcgcgatcgtcgacgacgacgcagcagcggtcgcttctacgcccgacaccgacttgtcgtcgtcgtccgaaaccccgacgccggccaatgcaccgccgcagacggaggaggccgcttgtgcggcgctcaacgcccggatcgagagcttgcacgacgcactgccgtcccggacggccctcgtcatcttcaccggccacgcctcgccgctccgcatggtcgagctccaggcaaagtaccggcggttcgaggaggccctccgccgcgtccggcgcgatgggaagggagccgaggcgctcgagccgggcgagagctggcgcgacgacgaggagtcagaactcgagagcgaggtcgcaaaggcgcgcgaaggcatggccttcttttgcgtcaagtcttgaatgatctcctgtggatgctggcatgccgaaccgactgcgcgactggctctgacggacgaagaaagcacagcggaacatctcagtcggaagggcgagtcttgcacgatcgggaccgagagcaggccagtgcttattgagttgcgctgcatcgcgcgagcatgggattagagcaggatgatgggggtgcctcgccggctggtccggtctgagggcgtctaggtgtgatataagggtgttcgtgtagggggtcgttacatgggcagaggaaaggttgagagagtgggcagggcctggcagagttaccgcttgttggcagcgttcttgctcatgccgcgaatcttggggccgaacttgaggaagagcagcgggatcgggatgaagaggacggtgatgagggcgaggatgaggccggcgaagcgcgggttgagggccgtgtacatctgattggcgaaaagggggaacgcgaaaccgaagagcgaccgaatgacggtcgtggcggcgagagccgtcgccgccgcaaagaggtaggtgtcgatgatgtaggagaagagcgacaggaagacgagaatgagaccggcgccctaagaagatggagggagggcggcgtcaacgctgggtttcgacggtgcaggcgagtggcagcagtcgacgcaccatgaagaggcccgacatcatcggcacggcccagtgaatcgacgggtacgaggtgaacgacagccagaagatgctgagcgggatgaagaaggcgccgacgatggccgactcaaggcgctagagagagcagcagggataggtcagcgcaagctctgtcggttttgagtcgagtttgaagacgtacgagctcaggaggagcctgccagggggggtaggcggccgaagccttgacgtagcgcgggttgtagtagaaggcgttgacgagggcggcgaggcaggcaccgatgaagaggggcaggactgtgcagaaaggaaagggggaaaagaagtcagctcaattcgtggctcgcgaaggtgaagtcggctgcggacgtacacatcagaccctcgctgccagccgacatgccgtggccgagctcgaagatgatcgggtaggcgacaaagtcgaggtaaaggacgccgtaaatgaacgacatgtacagggtgatcgagagaagcatcggctcctcggcgagcattttaaaggggccgacgagcgtctggttgagacgagccttgacgcccgacttcttgcggtcgagcggcgcccagtacgggtggccggtctcattgcggagcttggccgcctgcttggccaggaggagcggcgcgtacgtctcaggcaggccgacaacgatggcgaccatgcagacgaacgagaagatcgtgaggacccagtagatccacgtccaatcgaccttggccaccgtcatatagccaccaacgatcggcccgagcgcaggcccagcgaacggtccgacaacgaacgcagagagagcggtaccgcggacagccggtgaccagatgtcgccgaggacgccgccggagttcgtcatcgggttggaggcgcacacgccggccaggaaccggaagatgagcagcgcagccatgccgcgcttgccgccgcccatgcggtcggtgagggcgcagaggatattgaaaagggtgtagacggcgaaggcaatgatgaagagcgaccgccggccgtaagtctcggagagagggccccaggcgagcggaccgaagctgcaaaaaggagcgctcagcgtcaataaaggccgccgtagctagatccgcaacgtgcgactcaccagtagccgagaacgaagatcgagacgatgagggtgccgacagtccggtcggcaatgccgaactcgcgcatcgtcgccgcgacggtcgccgacggcgctgacgacgcgaacgaggcgttaagaacgagaacgcccgaaaggaacgtgagccagcacttcatggcgaccgaccagagcatcgggtttgcccggtcgcccggtgcaaacttgacctcccactcggcgtcggtcttgccgtggagggccttctcagcctcggcctccgccgcgctgtgcgcaggcgggtcggtcgagccgacggcgggagcaaccgagccgttcggtccgacctggggtgcctcggcgtcgatgcccttctcgaggtcgtgggcggccgttacgtcggcgagcgtcgagtttgagctgttgtggatggagtggcggtcggccatggtcgacatgagggctaaaggaagggcgtcgggagctttagcactttggcgcgcgcggcgggctgaaatgcagggtcgggggcgagacgtacattcgggagggaggaaggtgggtgttgagggaagaagaacgaggaccgtcgacgatccggttttggatgatcgagaaggagggggggcaggccggtgtagcggggccgatgaggtgtcggtggggcggaggccggcttcttgctgtaggcggtgagcgggcgggcttgctggttcggagggccggaagggctcgatgctgtctgaaagtgggtggatgttgagaagaaggacaagcagctctgccttcggctcttcaagtacttccccccttagctctcgcggcgcccgtctcggtcagcagcctcggcggcagcatggattgacgggctgcttacctcgtcttcttgacatcctgctggcggcagggcggaggcgaagccgaacggccggtggagcgccagaattagccgagcccgcccgcacgggcgacgcggccgccggcctgatttctcgccggtgtgccgacggaaagcgatcgaaacccctcgtcagcgcggtgtgtcggccccgacgtgcacgaacgcttgcgcacgaaaacacagcgaaagcagagctcaaggctgtcttgtctgtcagccggtcccgaaagcacgcgaaatattcccttcgcatctgcaggcgggccccactcgcgagctgccagccgtctgtagctctaaagctttcgcggatgaatatagtcagcccaaggggcgtgccgacgcgaccgacagcgccgcaaagtcggcctccgacgccgggctgactttgagaaggtcggccgcatcgcgtcatcctttgctggctggcgactcgcgtcgtctgggccgagcgtacctcggccgcagcctgaggtcattgtcgaccgcgtcctggtctggaagtcctagcccctagctggcgcttacgctgatcggtagttgcggccgtcgttttcgatgatgtcttggacgagccgcttgatgaaagcgccgtcgagccttgtccagggacaggatacaatggctgtcagcgaagggtcagtgaacggcaagaaaggagcgactcactctatctcggtcccctggaagtcgatcccgctcgtcttggccgagtcaaagtgcgggccagcgcgcctccactcgctctcgaagtacacctcgtccacccaaacggcgtaatagtggtggccgagcgagcgcgtcagcatctcgtagtcgcgtgtgaagccgtccttggcgaagatctcgatgatgtgcgacccgcgcggcatccacatgaggtggctcaggccgttgccgtggacgccgatgaggatgtcggtccgggacgagaggccgagttgctcgctcttcggcaacttctccatctttgcgtcgtagacctctgagggagacaggcgttggtcgagcgaggggtcagtgagctggtctaggcagtttgcaaggcgcgacaagagcagaggcgacatacgagcgagcccttcgccctcaatctcgtagagcgcgtccatcagcgagtcgtgcgacgactcattcaggtgtcgcctgccagtcccttgccgattcacgtatgtcaggaccgctgaagagggaggttgatcggtcagcgtgggatgtaaaggcccgacagcttcgtagacggcagcaagggacgtacgtctcggagcgatcggctcgtccggaatgtcgagcgaaaacatgagcgtcgaccggatcgggtcccaccagtcatctggcgccggtacggcatcgtagacctcggcgttcattttgttccagtggccgacctgggcgctgtgtcggtgggcggcccaacgctgccggcaggggatgcgagctcagatcaggttgcgaccgagagaagcacaatcctgcgggacgcacgtcggtgataacgatccggtcaaagcggtacacgcggtcgctcgcgctccggtcggcccaggcaaagcgatcctcgacgtctgtgggtggaaatgatcgccttcatggtcagcgcagagatcaatgagcgtcaacagacggcacgtacgggtccccggcaggaccgtctggaggaaccacgagttcaggccggccggatcgcgccacttctcagcccgcgaaaagatgacgcgctcgggaggacccgacgcgagcggctgccgcttgcgcgcggccttcgaggtgaggagccgccaggagcctgagaagagctcgatcagaaagtgaaagtagtggtcgatgaaggagccttcaggcggcccgtcgggaaagaacatctgtgcgaccaatcaccgggcgagaacggagagcagggtattagaaatcagtccggtggaagcgaggtagatgagcgacgcaccgtgtcgcctgcgaggcggaccacccgcgagccgaagagctttgctgcttcgctgctggagatgacctgccagccttcgcggcccgctgcgtgtctcgcgtcgcggctgaggatgcgcgacacctcgggcagagtcgagggcgaggacgtgacggcgtctggcagacaaatgaggcgaaagatgggtgtcaggtaagcaagcagtaaggcggctcatgtctgatgcagagttgagcacggtgagctggactgacaaagtgcgccccgaaacgcgtctgcaagtcgaatgaggcgaaccgacggagagcggcttgtcagtcgcacaccacaggcgccaggcgcgactctcctgctgaatttcatcttacagagattgctaaagagcgagtagccggccacgccggtaataaaggccgtctcgtcgtcctcatcccagtcgggcgacaggaactggtcgtcgagctgcgcgcagcgccggggagcgtcgccatcaagtggcaaatcagccttcagttgcctcggacggtgcatccaacgagctggaacctcaaatggagagagaaggagacgaacgcaccgtcttgtgtataggctcgagcccgagctgaggcaggacctcctcggcgagcaaattgaccgtctcgacgagcgaccctccgccggttgcggccgtcgacgccttgccaccatttcggcccgcaagccaggccgaagctgcgccagctcgtgtcgaaccgtccatcgtgctcgtctcgtccgtctttgtcgcccagtagacgacgaggccgactgtggcgagaagcgcaagggcatagcggcccggcaatcggaggcgcggaaggttgttacgaacagaggctgcgggccgggctggcttgggcggcgtcgttggccggcgcaagggtggagaggtcggtcgacggctgctaaggcccgacatggccaatgctaggagagaagggctgtcggtctatgccttgtgataagagtggagatcgaggacgacaggcgagatggtctgtcggcgacctgcacgagcctctgcgctgcgcctcgctcgacgacgacgttcggcttttttattttccctctctcgcccggcggcgccggcagccagcgcgggacaaggacgcgaagcgccgtgctctcgtcctccaccgaccaccacgaccctctactcgacctcacccccctacccgaacctaccttctcactactcaacatggtcagtcccttcatttcgattcgtccctgtgaagttgttggcggtcgaccgaggctggtggcgatgaaccgctgtcttcccggccgggctcggttgagctcggagttgtcgccgcgcgctctctcgcccaatcgatggtcggccgttgagggctgtcgccacctgctgccgaatcgctcatgctgctgctgaagcgcggccgacggaagctaggctggcacggcctgctcgctggcatccggccagcggtcgaagagggcgaacttgtggcggtggccgggcgatctcccttctcaccgagctgaccatcccctttccctgcgcttccacgcctttctgccctcctccgctcgcccgtctcaactcttcacctttgtccaccggatcattcgtgatgcagccccgcaagtctggaggatcccgccctgccccggccgcccgcccgagtgcgccgaccggccagcgctcgttcggcactgccgcccccccccctttcacatgcctgatcgttcattcgtatccgacggcatctatgctgaacgagccgagtacttgtgaacgcactcgaggtaccagcgcatgtcctcgggactgacgccaggcgtaatgccgtgtccgaggttagcgatccagcccttcggacccttgccctcgcgcccagagaggaagccggcgcacacccgcttgacctcggcctcgatgccgtcccggccgccgtagaggcagacagggtcggcgttgccctggagcgcgacgttgccgttcttggtcgcggcgagcgcctcccccggtgtcgtgcaccagtcgacggcgaggacgtcaaacgcgcccgactcggcacagagagcgagcgacgaggccgcgcccttggcaaagaggatgatcggtggcggcgtcaggccgagggcagtgagcttctcgcgatagatcttggagatcttgaggagcggcgggaaggcaaacgtcttaaagtggtaaggcgtgagctcgccggcccacgagtcaaagatttggacgatctggaggagcgcaaggaagaggagattcgagcgtcaaaggaaggggtcttctgcgagtgagggccacagcagaggtgcctacctgagctccagccttaacctggccgacgaggaagtcggcgcagacgacggccgtccggtcgaggagctcgtgcgaggcctcagggtacttgtgcagccacgtcttgctctcctgccacgtctttgttccgccaccctcgaccatgtaggccatgagcgtccagggcgcgccgcagaagccaatcagcgggacctcgcccttgaggccgtgccgggtcttggtgagggcctcgtaaacgtagccgagcgttgcgtccgtgtcgacatccttgacgagccgagccatgtcggccggctcacggatcggcgccggcaggaacggtccaggcttcatttcgacaaccaggccgagcgcctgcgggatgacaagactgcggaggagaggcgagaggaagtcagcatgtcgtctcgagcagggaggaggcaggcggtcggcgagcagacgcacatgtcagagctggcccaaggagaggtgcgcagtatagaagcagtcagctctaagttccatctcaccggcgggcacggcgtgcaccgcagcagtcggaacaagtgcgcacaagatgatagccgcgtcgaggaggccggtgtagcgccggatcggctggagcgtgatctcggacgcaatctcgggcgtctggcagcactcaaagaacgagtgctccttgcggacggccatgaactctagggcaggcgaacggcgggcgatgagagcagagcgaggcggtggagacgatccatgcgaggcgcggatgctggcggtcagctcagatcgggtcggcagcgagctctggaggcgacgtaccgggcagatagcggccggcctggcgcatgacccatgccggagcacgctccgtctcctcgcctgtaagtgggcaactggttagcactcttggtcgtccggcatcacgctctgcccactcatcgtcgaagccacgcgcgcgtggaggcaacggtgagagaggaggcctgctcgccagcgtcgcagaccgacgcacccttggccgctcggaggagcaggtcgtttttgagctccgggaagcccgtctggatctcgtacgcgggcatggtctctggattcaaggaagaggaaagggtgggtgtcggctgctgcccgctgagggcggccttgcccgggcttcgttttcggtggccgcgcgcgcgcaggcgccgcacctgcggccgagagactgtcgaccgatggatgcgcgcttccagactgtcctgttgtatagcgaatgagctggatatgctcgacggattgccatgccaatgctgcttcgtagggcggcctgtatgcttcacgtaggagatgcgctgccgagtacctgacggctggcctcaaccgcctgcgcgccgggcttcggtaaccctaagggcccgtcttcggagggcggacgacgacgacgacgacgacgacggagagaagccacaagccgcacccttcagacatcgacctgccatcacctcctcgcctagcctactttcacgatgcctcccggacccgccatgcagatgcccgtcggtgcggcgccgccctcgaccttcgacaagagtacgtcatgctctgacggcccggttggcctctctgcacccaccggccggcgttgaccctcttctatgccctgccttcgctcgctttgttcgaccatctagtcaagatgggcgcgacgatgggtgtgagtctgccttctgccgaagaagagccggcttccgtcgccaccgtgctcggcttgaatatccggcgagcttgagctgacactcttggttggccccgcctcccttgcccctttgcgcttgcctctttcgccaccctttctcccagaccgtggtcggcttgacgatgggcttcatcttcggtggcttcaccgtcatctcgtgcgtctggtcgccgtcctaagattgctcggctgtctccacatttgctgactttcgtgtcaacgaccgtgctcttgcaggggcaacgtcggacctaagggcgcactccacaccatctcgaagtacatgctctcctcgggcgggacgttcggcttcttcatgtgtgtcctcgagcgcgcttctggcccggacataaatttcaattcgaccgactgacctcatcctccacgcttcaggggcgtcggctcggtcgtgcgcggcgacggcgcgacgacctcaatcacccaggccttccgcgaggaccggctcctgcgcatgcggatcgcgagcgcgcaggagggccggcagtggcagatgaaccagcgccggagttagactctaattcaacttctggacggacgaggagagcgtggttgaagcgaccaggccaccagcgcgcgcgtcaggaatcgttctcgtcgctctctgtctcgccgacgggggaaagaacgggagagtcgaggtcccaacccgacagagggcgtggccctcgtgtatcagtatgggcccacggcacctttcccacacgttctctctgcccggcggcgctctgctaagacacaacagacatgacggacatcgctcagctccccccttcgaacgctcagctgtgccagacggacccctcagggaccagtgtcgtcgctgctgatgttgatgagggatcactcgtcggtgtaggtgttggcgatgctggccctgcatcgagccggctgatcttggcggccgacggctcgctcgtagcctccgcgccagcgtcgtcctcgccatcgtcgccctcgccgtcgtcgtcgtcgttctccgggtcctcggctgccatctcggccgcgacctcccgcgagagcgcttcctccgccgctgcgctcctcgagccgtctccgctgccgttgccgttggccgttgtcgccttcgcggcccgccggagcttcttgaggatccggtgcgcaaagtcctttgtaaactttttgatcttggcggccttctcttccgacagcggcggcacctgcgagacgttgatgaacgaggccgacttcttctccttggcgacgatcagctgggcgcactgtacgcgagcgcagagagaggttagaagggggtggtcagtcctccgtcacactctcgcagccgcagcagcctcgggaacgcacctgtttggcgtactccttgaacttgtcgtggtccatctggtccttatacttggacatggaccgaacgacgacctcgccgacgagaccgagcagccgcttctccttgtgcgccgcgttgccctttggctcgagcttacccgtcggcactcgcttgcgcttcttctcgcggcctttacccttctctatccgaagcgcctcgattcgcgcgcgctcctcggcgagctgagcagcttcgagctcgaccttctcggcggccttgcgctcgctctcggcctgggcggccgcagcctcggcgaggagcgagctgatgtccttcttcgggacgaccggcggcggtggcggcggcgggacatagtggtaggccgcgagcggttctggcgcaggtcgcggcttgatggccgacaaacgggcgatctgggcgaggaaagaggtctctccggttgacgggccgtccgcgccgatcttgaagagctcctctctcggccgctcggccgttttgggcatgtcccatatgctggggccgatctcggccgacttgccatcctcggctccctcgcgcttctccctacgcatccatttgacgggttgcggtagcgcagcccaggcgaccaagagctgtgtcaagcgagagcgtcagcgaccgcgtcatcagcaaggctgtgaaaggggcagacggaccaggttgccgagcgtctgaaccgcctcgtccgcggcctgatgcagcatcgtctccttgacgaggtcttctgcgtgggacgcctcgacctttgcacgattgaggatcggccagaggcccatcacctcaaagacctgcaagaacgggcgcttcagagtcagcgctcgtccggccaagctctgcaggaggtctcgaacgtacaagcttaatgacatctgcgtcgtcgctgaactccttgaggacgggcgccatcatgccaaagccgtggaggcggaacagccggcgctggacgtcctcgtcgttggtcgcctgttcgcgtgacatatgtgtcagcgcagtcggcaggactgtccgtcacgagacgacagggccgaccttcatccgctggaggagcatgcacaggacggcacggttggacgtcgcctgccggacagcagcgaccaccttgggcgcctcgggcatggcgattgggtaaattgtcggctacagggcgggttgcagcgagggttagttgcatgccagctttcatcgacgagacgcagaccgatccgagcagcggcgaggagctcaccgtgtagtcttcgccgagcttgagcgccttcttacgtttgttgcccttcaggccctttgcctcgacctcggccgtgatgccaagagctggcgacgaggcgtcgaaggatggaggggcgtgagggtcagtgtgaggcccgatgaaacgttgaggagaggccaccgaccgtcaaggaagaggtcgtccaggccgccgacgtccgtctgcgtcttgccgccgatcgaaccgacgcagttcggctcgtcgcagtagcacggctgggcctcgtgcctgtcaaagcgaagcgacgttcagcgtcctccaagggtacgcgggtccacgcagctgacgcacccgtagcggtcgacgttgtagttgaaggtgagctcctcgccctcggcaatgtcgcgcttcgcaaagatgcccatccgcatgtgcttgccgacgacccacttggcgacgtagcagtttgggttacagctgtggttggcgaaccggccgatgccgcccttgcgcgtcgcatcaatgtactgcagggagccatcaggtcagtcgctcccgctttcagcggttgggagctgtcggccggccgcacctcgtccttctggagttccataaagtaaaagtgccggatgccctcctcggcgtacttctgcatccggtcgaggaaggccttcttttcgacgacctcgccgacgtactcgtagatgaattggtcgctggagggaggagccgcgtggagcagagtcgggaagccgctgcgtcagcgaacgggccacctcctgctccggcactcgagaggcacatcctccgcagcaccgcgcgcgctggactcaacgcgaccaagagggctcgaaaggggacgtacgatgttatgggcgactctgcgcggaggccatagcccttgcgggccgtcttgatgactgagatgtccgcgtagtcgcgggcagagaagctgcgagccggccggtgccaggtttcaacagctggtcagcggatgctgaagaggaggctcaacaggcccagagcacgctgctcaatctgaacatatgctcgacaaccaggtacgagctcgctcatatggacgcaggcggtgcctgagctgtcggggcgcgtcgagcctgtctgtgactgaagcgcgcggtgaaaggacgcaccgttggttgaggcaatgcttgccacaccggcactcggacgggagacattcaacctgggtgagccggttgatgcagccctcgccacaggcccggtccctcgaatcgacacctgcagcagcgagaccctccggcgtcagcttcgctcacgcgtatgccgctgtcgagggagagcgcgtgcacgtgcaggcccacgccgcgacgagcgccagaaggaaagaagcaactgaccgtcctcgtaggtgcagtcgcagatcatagagtcgagctcctgatagctgaggccgagcgtctttggcgtatgggtcgacttgacgagcgtcgtgaactcgcgcgcggcctcggcggtggcgacggggcagtccttggccgtctgtgaggccgtgttgggcttgaatggggcggccggtggcgttgttgccgcctcctgtgccggcgtcggcgtcggcaggccagacatgacgggccgggaccggagggagacgcgaggtgatgcctctcggcccgaggggagggaggacgcgagctcgtgtcgcgccggcggaggcgtcggctgagggcggcgacgggatcgcagcaaggtgtcagtctccaggacgcctgaaggcaacaacaggctagatggcagcgtacctggtcggatctctccctacagatgccctggtcgtgactgggctgctgttctcgagggcgatgcaggtcgtcgtcgtcgtcgtcgtcggacgctctcccgcccaggcagccacagctcgacgaagacgcgcgccgcctggcagctcgcccgccctgacaggttgaatttcgtcagactccctgcctctgttcctcactcccgctccttcccacagccagccatgcctccctcgaaccaggccggatcgtcctcgcagcagcagcggtcttcgtcaaagcgcaagctggcggtcgccgtcgccgacccgaccgaggctggacccgtcctcggtgagctcgcacccagctcgcccgtcgtccttgcctttcgagtgcctccgggctcgtcactttggaagtcggctctttgatcctctccttccagcccgctgactgtcggcctgccactcctcagcccacttcccgtcgtttgctccaccgtcagagacgccgttctcgctctaccgggccaagtcggccaaggcctcggtcgcgatcgaggaccaggcgacgctgcttgccggcgagaccaagggcgttgagttcttcagccagaaccgtgacgagctcgtcggtggcgaggaggagaagggcggctatgcgtgcaagttagtagagccgcgtgtgctgtgtcggcttcagccaatcgtccccgaggctgaccggttcgaccccgcaaccctggcccgctgcgctgcgccctccttccgtctcgtccagatacgtcctcgctctgcacgacccttcgacctcgaccgtgacgctcgtgccggcaccgacttacctgatggcgcacacggtcaagcggctgaagcgggcgccgactgcgccactcatgccggctcagacgagcaacatggaggcccgcaacaagcttggcgaggccttcggaacgcgcaaggccaagacgcaaatcaagacggccgagcgcaacaaggtcgacgtcgagggcatggagggcgtccgggagctgatgcaggagggcatagagagcggtggcgctgtccttccgacaaagggttcgtctcgccgcgctctcgccctgcttgctgctggttgctgaccccgatcttgcttcccaaccgccagaggagatcaagaagctgaacgactcgtcacgaccgatcccgccgccaaacatgctggcggcaaccccggccgaggcttactcgctcgacgacattatcgcgcccgcggcggcaacctcgctcaagttctacgtcaaggagctgatcgacgccgagtcggatgaggaccggatcagcctgctcgcttaccggcactcgagctgggtcaacaagcggttgaacgagctctgtgcgcgcgacaagcccaacaaggagaagatgtgcgtttcccctccccctcttgccgactggtgcgcgctgtcggccggcgagctgacctgtcgatcatccggaccctgccagccgctgcctcgtctacatcgccgtcatgcgcggcctgctcaagtcgaagccagatgcgctcggcgacattggcggtctcatgaagaagttcaagggcgtgccgcgggccgtccttctcgacctcaacgagaagtttaccgagtcggtgcgcggcgtcggaaagtgcggccttccgccagctctccggccttttgcagccgtctcagcgctgactttacccttacctttgccgatctcagggccaagatcacgcccaacatgaacctcaagatgcagtcgtacatgtgcgtgctctcgctcatggtcgacaactacctcgtcgacgcctcggctatggcgaccgacatgaacgtcgcgacctccaagtacgtcttctgcctgctcgtctcccgctctgaatcgcgccctgacccgtgactggtcgtcgcatcactcagggtcaccgccctcttccaaggcctcggctgtgtgattgacgtgccgtcagccgctgagcgggaggcgctcggcctgacggcgaccgaggcgcggggtgcgaagcgggccgcgctcaaggtgccgctcgtcttcaaggaggcgagccgggggccggccaagaagtagacgggcggctgttgatgagcatgctcccctttctcgatcgtgccgaggtttttgtgccggccagctcactctcgcgttgctccagcagatcttacagtcgccgcttggcgaggcagatggggaggtcgatagggcgagtaatgcggcctgcgagatcaaagggtcaagcagacggacgtgcagcagccccccttcgatcgaaagcgagcttggacctcgtccgctgagcttccgttgactgggggcctagctgacctgaaggggatgatgagggcgcagcagctgcgcggatgggcgacgagagcgagcgcaacgggttgcagtctgcttgctgcctgacgtccaacgagccttcccctctctcaccgtcatgtccgagctcaagcgcaagcgatcaggctgtacgtactcgtctggtagcaagaagcgctgtcaggtcattgggttgacagttcgacgttgggtcggagacggcagctgcgaacgtgccgaccgagaaggagcttgtcgccgagctcgacgagctgatggccagcggaatgacggtgagccgcaggcagatccccttcgttgcttagagcgacgatatctgaccctagtttactccttgtcaccgcagaagagccgactggtcgcgcttagagtcagtgtggcagccgaacagcgcccgggggagctcgccgagccctggcgtgctgaccgtcgccctcacccttgtcgccgtcgtcaggctgaaccaaagccgttttacccggtctgcgagcacatcacggcagcgcagtgctctgtactctcgaaaggtgctgttgcttgcggcaaggtgagctcgtctgtcgaagcctcgtcggctgcggcgcccgactgaccctggcccgaccgtccgcgcgtcaggtgcacatgacgccgctcatccgcccgcacaccgaccccgagctcggccattgtagctacctcaacacttgctacggcgaggtgcgctatgcgatccggcctgccagcgttcggacggtaactgacccttgcacgctccccagccgtcctacgcgcagtctccgtcgctcggcgggggagggcctgccccgagatcgcagaaggactgcaagtatctgcatttcgaagtcgccctcccttcgacgtctgtgccggcgcctgcagtaccggcgagcagaacgagcttcccctcgccgctgccgccgacaccaaaggctcggccgccaagcgaccctttggagccttacaagccaacgctcaaggatctcgcgattgggacaccagaaaaggagcagcagtggggtccgagctggctgacctgtgacgtccggtcgtttgatctcgaggtgctcggcaagtgagtcgctcaccgactcggcgcgctcgaccgaccctgtctgcagcccgactgattgccttacgtgttcaggttcgacgttatcatggccgacccgccctgggacattcacatgaacgtgcgtcgcctcgaaggagcttcgtccaaagtctgctcgggctgatcgcaatcggtcgtccgccacagctgccttacgggacgatgaccgacgtgagcatcgcaacgctcctccctttcgggcgtacttcttgctgaccattcaatgccgccttcaacaggacgagatgcgctcgctgcccatcccagcaattcaagaggagggcctgctctttctctgggtcacagcgcgtgcgatggaactcggccgcgacctgctcgcgcactggggctatcggcgagtcgatgagattgtctggtgcaagacgaaccagctcggccggctgatccgaacaggtcggaccggtcactggctcaagtacgtcgctatttgacccgcagcagacatccgtaggcggctgacgcctcttttactttgctcgacagccacacgtgcgaggtgagtgcctgtgaagaagagcgccgcaagacagcgctaatctgactgcctaatcgactctctgcagcatctgctcgtacgtcccgtctgactatttgagagtctttcgactagtgctgacggtagtcctacctcgccttcttttaggtcggcctgaagtcgcccgcagacccgtcaacacccgatctacccaacacgaggtggccggcctggctccagcgtgggctcgacaccgacgtactcgtctctgaagtgcgggagacgtcacgcaagcccgacgaaggtgcgcatctgtcgctttttgcctcgtcagccggctctcctgatgccgagctcttccgctcaatcaccagtctacgacctcatcgaacgctgctgcgccggcggccgcaagctcggtgcgagaagctcagcgaccatgaccagttgaaagcgtgctgacaaacagccgcacccttctctcgctcagagatctttgggcgcaaacacaatacaagaccgggttggttgacgatagggtgagttctgcgaggcgagttagccccgcagcgttgtcagactgaccgctcttggcgacccatggcgcacccgtctcgaattagcaatcaaagtgaggccctcggtgctcttcagacgccaaatctgttcactgacccgccctcctcatccggaccagtcggcggcgactgcatccacgagccgcagctggcgcggcgcttcaaggcccgataccctgaccgccagaaccttgccgaggcaacctgaccggaccggacgaacgaaggccgatgaccgatgaccgatgacgacgaattgatgaacctgacaacaacccggccttacaaacgtgagaagggccgttcaagagccatctatgtccggccgatgtcgccgacaccgcagtagcgctggtcgtggtaaacaagcgggaggcctttgccagcttctaggtcccctgtcggcgggtgaccggcagcaagactatcgctctcggcctcgacgagtggcggcagaggcagcgactcctcaaccctcacgacctcggcgacatacagttcgctcgtcgcctcgccgtcccagccttcgctgccgctgcccaggctaccggcgctgaaaccgaccgagcccagaccgactgccgaaagcgggaccgagccaagcactcgacacgagatggcaccgatgcagccaccaaggactggaatgccctcggctgacgggctgaaggggtgcagggcaaatggcgaggccgctgagcccggcggactcgatgacgcgccgcctgccggggttagggccggcagggcctttgcgaacgatgctgcgaggggcgtctgcgatgacgacaggtagtgaaggacgatgttggcctcctttggcaagctcggcgtgctccctgagggtgctgacgggctggagctggcggccgaggaggctggtgctccgatggctgctgcgagccgcgacggtagccggagcgagaaggcgacgagcgggagcggggcgagcgcgacgctcgtcaagctcgacagcgtcgcgccgtggtagtgtgggaagggcgtgtcgatcttgacagtcgctatcgatacgggctgccggcagcaagcagtaagggtcaggcgaagggccgagcaagagctcctgcggtcggccggttcgcacctgaggtacgcgccgcatgagccccttgagggcgttcgatagggcttggggtgtgctcattctagtagctgtggccgctcggtcgaaggcgtgtacaagggtggccagatgaagaacgagcggaagaagcttgatcagggaagatgagcaatggggcggaggtagtggtcggaggctcgcgtcggctctggctgtccctgcaggcaggttgacgtcgggcgccaataatgatgggggcccctcccgaccggtcgcacgagctcttctatatcctgcgctgaccggtcacttagcttgacagggcttcgacagcggtccgggccatctcaagcccgccaaaggctgggcgatgctactcggttcacggcgcaggggccaggcgtcacctgttgaacccaagagcgacatcaatcgccgccgtcgtcggcccccgcgggcttgtactccctccgggccttcatctcgcggtagtgcttgatgacacgctcgcgctcctcctcgagaatgcgcgcctgagccgggctgaggccaagcttgccgtaggccgagttcttgccggcgctgctgtcgccgtccatctgcttggcgagcaacttcgtcgacagtcgaggtagcgtcaactgtggcggcgcctggacgatgtcgttgagccgcttcggggccgacgacgacctcttcggcgcaaagtcgagcgcgaccgcctcgcgcttcttctggagggcggcctcggcccgctggcggtgctcctccttcttggccgccttggtcgcctcggccgcggcctcgtcgtccttctcggcatccatgccctcctcaccctccttgcctttgcccttgcccttgccagacgtgtgcgcctcgtgcttggccatgcgctcctcgcgctccttccggaggtgctcggccgagtgggcggcagccttgcgcgatgcggcgccgaccgtcgaccggagcgagtcctcaacccggcggttgaagtgggcgagcgactcgccgtcctggatcttcaggccgttgttggcgagcgtagcgtcggtctgatgcgggatagggcagagcacgctgtcagccctgtcatctgctacgctgcacttgaagcacctgtgccaaggggagaggccgcaccttccctgccttcttcttgcctccctcgccctcggccagcaccggcttcttcttgcggccgtcgtcctcgctcggcgcgagctcgccgcgcttccgcttgccaaactgtgcctggacggccatcgagttgaggacgcgcatcgccgacttgggtgcgtcgtccatgccgtcagcgccagacggagcctggttgtagccgctgttgagagaagcaagacgaggcgaggtcagcaggtggcctgcaggtcgctcgacgggtccgcacgagctggcgaggcggcgagcaagtgtcggacgcacgagctcttccgggtcgagtcccgtaccgacttcttcgcgcctgaagaagagcaggagggacatagctgaatcagaaagcagatgacaggaggcgacccgggtcgagacgagcgacctgacgcttgtgaggcatggcgacgaggggtttgaggttgagacgaggaggctgagggcgattcctttgaagctcctggtcgggctaggtggatgggcaacggcgagctggatcgagcgtgtaaaagagcgcgagctgagctgtctgatgtcgccaagggtagctgtaaaggatagaggacgaggtggttgcaggttcgaggcagctggccagctttcggctcgcgtcccgtgctctctgaatttgccctgctgcgcccggcttgccttacgtctgcatgcggtacgtcttcttcctcggtcattcgctcgaacattccccttgaccggcgcccgttctaaaaatcgtcgttaggctcattaaaacagactagagcgtgcgaggctcgtacaggactctccgagatcagaccagcagctgctccttgcgcttctccgtggcgatcagaggatgacgcagcacccgccgccctccgagtccttcttctcctttgcccgacgaccggtcgccgtctggttctcgcccctccttgaggcgccgccagacgcgccagcagccttcgacgggtcgtccgggacgagcatcgacacgcgcgttgccgcctcgaagacgtcgtcaacgccgatgttttgaagcgacgagcactcgtagtaggcgcggatgccgagctgctcggccgttcgcataccctgccctcagtcaagattagaggatgacctggatcagcggcgagcgcgctcttgcggctgaccagcgcatcgacgcacctctgaggtctgaacaaagcgggccgagtcgccctgctcctgggccagggcgccgtcgcgcaggtccgacttgcagccgacaagcaggacggggatgtttcggccgcagatggagcgcacttcctcaatccactggcggaagcaacgcatagctcaaggtcagcctcgttccgcgtgtttgcgcgtgccccggccaaggatggaccttcgtattgacgttgtccagcgaatcaggtgtgtcgatcgagaaggcgattaggatgacatgggcctttgagtagctcagcggtcgcagtctctgcaggtgtgggcaggggaccgtcagcaactgtctgtagcagagcgaaagcatgaagcagacgctgacctcgtactcctcctgcccggccgtgtcccagagggcgagctgaactggcttgccgtccagctggatctcggcaacatagttctcgaaaattgctagacaggcgcgaggagggactgggtcagcgcagccgacagtcgccggccgagaggagcagtaaactgacttggctcctgaggcaggtgcagggcaaggagagagggccgcggtcagccaggagctcgacaacatgttgcgctcggtgggtaggctcgtcatgagctgagtgcacgaaggtcccgaccgcatggctctgcgaggccctagctccgtgccggaggtcggcagccgccttccccttgttcagacgatttagacggaggagcaggaggaacgcacgtattccttcgggaactcgccgagcgagaagacgcacaagagcgacgtcttgccacacgcgccgtcgcctgagagaggaaggcgaacgtccaagaatggaatcagtcaccgtcgctccgtccgccgatgcgcagccgctcgaccagcgtgagccgccgggccaccattcttcgctcgggccggccggcggctggtcctcggggccaagaaggtggcaaggacgtaccgacgatgactaggagggcgacaggtgggccgatagcaaagcggggtcagcgccgtgtcgaactgcttcaggagcaagctagcctggtgcggcgtagccaggactactcgcgctcgccccgacgggcgtgcgacgtacctagtttcctccggatctgcaagtcgacgaggaaaggtctgtcagcatgcgagtcaagggtctcggtgaggggcgacgtacgacattgctactcgaggtggaggccatcgtcgtcgcggacggtcaacaggggcgagcagacagagggtgtggcgcgtgcgaggagcaggctcggacgacgctcgcggtgaggaaggccaaacgggggcggagacttgctgacgacgaatacaatcgagcgacagagtcgtatacgaggcgggctggctgactgctgaggagctctggaagtaagggcggaagatggtggaagtttgggagaaggcgatggggacttcgagggcaagttgccggccgcttcccacgcgcaggctgccggcagaagctcttccttcaacgccctccatccatttcaactgaaatgatggaccgctcaagcatggacgccctactggactggatgaagacggccggcgcacgctgggcaggcgggctcgaggtccggcatggtgcgtcgacggcctcatgcttctgccgcctgcgcgcacagggctgacgtcggagcttctcctgccgccgcttccagacgacacatacggctgggcgcccttctcgacggcgccgctcgacgccgatgaggagatcatctcggttccatttgcgctcgtgctcacgcctcagctcggcgacggtgcgctcgccggcctcaccgggcgcgagctgtccctcggcagtctcgaggagagctcgcgcctcgcggcgtacgtcgtcctacactggatggcagccgctgccgccgagcatcggaccgatcagcttaactgggcgtgcgttcagtcactgccttagtctgcatagaagccttcgctgacggttctgactgactatcccgacccacactgcgcagacgcgcaccggaactgctgaggcacgcgccttacgtcacgtccctgccgacgacgtcgctgtcgcccatcacgtactcgccggccgagctttcgctgttgaacggcacgcctcttccatcagcgacgatctccctcctggcggcgtggaaggcgcagtacgacgccttaaccgctgcgacggccgttggtcccgcagagggcttctcgcttgacctcttcaaccgggcgatgggcctgatcgcctcccgctcgttcccttcgcgcctcctagatagccggaagcacgacgacccgctggctgatgccaatcccgacgtcgtcgagggccaggaggggctcgaccatccgatcctcatcccgggctacgacctgctcaatcaccggccgatgacgcccgtctcgtgggtgtcgactggcgccgagagtcgcgtctcgctcgtccaccactttccgctcgggcccagtcagcagatcttcaacaactatggctcgaagccgtcgtcgtcgctcttgctctcgtacggctttgcgctcccactggacaagcagccagagggcatggagacgctgcctcttctgctcggagggatcccgccggccaagcaggcactctgcgaccgggtcggcgtaccgtggtcgaaggcgtgggacctctgcttgatcgacggtgtcgtcgagcccccgacgggcctgcgcaagcttctccgcgtcgtcgtcgccgacccggacgaggaggccgagattgctgccagcccagacaagctcgccggccacgtctcgggcgacaacgagctctcggcgctcgatgcgttgtctgaactcttgcagggcaagctggcggtgctccaacgtgtcgctgcgacgaacccgccggccggcgtccggcctgaggtcgttcaggtgaccgaagtctatcggacgaaccagatcacgctcctgtccgaggcggcagcctggactcatcgcgagataacgggcgtcgcgcgcgacctcgggctcgaccttgatgccgaggaggagggatagtatgcggtccttccacctcagggagctcgaaaaggacagcgttgcatacgacacggggaacggccgatatgggtgggtaaagaagcagaggggctgggggggtttgcaagactaaggacacgaggctgacggcgacgacggtagtacaagggagcgggaaacggggacgaaggcaagaagggtaaagaagcacaagaagaccggggctggattgagagaatgaagggcgaagatgagagcgtccgagcggccgcgaccagagggcgctcgacattccgatgaaaagaggcaggaagggaggccagcgagccgacgcaggcgctgctggacgggaacccgtgccagacggttcccgcccggcgcatgcgcggtagacagagctgagcgcaccggctagctctggtcatgcgcgctacccagagcggacgagcgtctcggggggtgatgcgtgtgccggtccgggtcgctcgacgggcggcgggccaatgagcggcagcggaccagagggcgtcggcggctgcccaagctcggccgcctcgaacgacatgagctcagccatgaagccgatattgggcgagatccctcgccgacgctcgacgacgaaggcgtaggcctgcttgagcgtccatcggttggcgtggatgaggtaggcgaggacgacggtgactgaccgcgacttgcccgctcggcagtgcacgtaggtcggtgacggcgacctcctggcgtcgtctgcgacgcgcggcaagagcaggcacagtattagaccagagatacgggggaaaaggacctcgagagcgctgacgttgctgcggccgcgcgtgcgccggtcacgctcgctcgcctgcctcagctaacgccaagagacgggcaacagacgcagcgaggcacgcgacagccaggccaaaggaagtgagacgcaccaaggaaggcacaagcctcctgaaggccctgggcgacgcgcatctcctcgaccgtgtcctgcatgccgatcttcttgtactgctcgaagcgcgaggcgatcccaatctcgtcctcgcactcgacggccatgttaaggatccgctttacgccgaggccgtgcagttgctgctcctcggccggcagcgtcgggtccggcccaaggtagaggaagcccgggatgatggtcgagacaatgaagcccgtcggtgacgagcacggcggcgagtcgcactggtggtgaaacgtcgaccggtcgtaaggtgccgacgatggcagactcggtggcaacgaggccgacgagtacgacgacgatgcgaccaggctcgcgctcagaggcgccgacgacgccgagtgtagcggcggcgtcgtcaggttgagcctcggtggtcgaggcttccgcccgacctcgtcggccgacacccggcgcaggtgaggcggcggacgcgacgacaccggcggtgggcggcttagctgaagcgacggcaacgctcgccgagaaggtgatgggccgagcgaggccgacggcggcggtggcggcgaggtcgcaaaggcgaggtgcggggctggcgacgggactgaactcgaccgaaccggcagcggcggcagcggccccgggtgctgcagccaggacgacgacgccgccggagcgcacccgcggcccaggtcggcctcggcgcgccgcatgcacgagaaggatcggaagtgggtagggggaaaagagaacggaagcaaggtggccgagagcggatggacagaggtggcggtgagaaggcaagcaaggcggaaggggacgcgggcgcgtcgtctctctccgcgacgccggtgacatcgccttcggtcgctgcccgcggcgaggcgttttgacaaaaggtccactcgccgctcttgtaccctcataaccagaatgagcaggcgatgtctgtagtcctttagtagacgagctgcttgttcgggcgagtactcgtcgaagaaggtccctcggtgaaggcgccctgccagcacccttttgtcaactgcgcgcaatgttggctcaccgggagtccttcctgacgaccagtctgccttcaaggggggcgcggcggtacttcaaggagcgttctcttcgaacattcgggtcgacggtgcagcggaaagagagtggccggcccgggcttgtctagccctctgtccgcgccccgccgcgacttactacaggccttctcgcgaaacccataacatcgttagatcagtatcaaatatgatcagtgaaaatatgcttagaaagctctggtcgaggacttcaagcgagttcaggctctgttgagaaagtcggatggtcagtgtatatgtggggggttaaaatattgctttagatactgtacaaaacgcccactttcaacaaatcttggttggtccaatggttaagatgttcgcttgtcacgcgggagacccgggttcgattcccggatcgagagcaatcctttttgttagttgtgactagaccctagctcgctccccggttcgattgcaggagccatctcttcctttagcgcacagtcgctcacaagtgatacattcgctgtcatcctatgctccggagaagcctgtacacagacatcgagctggggacgatgctgcggctaccggccgagacggcgagagagacgcccagctgcagcgacagacattccgtcatgtcgccacaattaatgctggacaaaaggacatgcttagacatcggcgactagatgccagccgcagcttctcggggcttccagagctgagtccagtagatggctgcgtggatggcccacccccggcggccgtctcgttgctcgcgacagacagcaccgctggcctcaccctcaaccctcacctccctcaacatcctgccgcctttccctcttccgcgcctcttttccgctccctatctacctctacgctctttgcgcttgccttccatcgacccaatcgccccttctcctgatgtccctcgcctcatcgaccgtccggcggatcgccaaggagctagcgcagctgcgatcgtccccgcccgagggctgccgggtcgtcgagagcctcgacgacgacgacatcacccaattcatggcttgggtcgccggaccgtgagttcagcgcctactcgtgtagctcgttggcttgattctgcgctgtctggaaagctgaccgtggcgctctccccctgctcgctcgacctgctcgcgtgcgacctctgctcgactcggcctcccagtggtacgtcccttccgtctgctcctggcccctgccctaatcttggacgcccttcatggggctgctcgggggccagatgtgctccgatcaaagcgacgtgaactgctgtctgcgtgagcgcgaggggagccggcctgcacaggcttgtcacccaacaagctgctctcgacgcgtcctctcggctgctcctgtgctccatcttccctcctgctctcagaactgatgcctcgacctggatctcgcgctctgcagagggaacgccttatgccggtggctacttcaagatccgctttgcgttcggcgacacctacccgtcgcagccgccaaagtgtacgctgccgtcgcgcgcaggcccacccaactgactgcaaactgacccgctcctgtcgttttcatcgtcggtggatgtcaggcacgatggtcaccaagattttccaccccaatgtctcgaagcagggcgagatctgcgtcgacacgctcaagaaaggctggacgccggagacgggcatcaggtgcggacagcccatcacctggccttggctgcccaagccccacctgactgacattgtgacctcgtcctccgccatgatgaacagtcatatcctgagcgtacgtcgcctagctcagcctacattgcgcgcctcgcccttcctggctgacgagcctgccttgccgtcacaggtcgtccggtgtctgctgatctaccccaaccccgagtctgcgctcgacgaggaagccggcaaactactcctggaggcctacgaagactagtacgaccattcgcttggcgaccctcttgcgcgatgcaggctctgacactacgacccctgccgctgctccagctgcaagcacgcccgcctcttcacctcgatacacgctacgccaaaggtataactctccctgcgacgagcgacgtctcaacctgcctttccagaagccccttgtgacgccttggcccctgccttcgcagaacccgccggccgagtttgcgtctgacgagcccgcgaagccgctgtcgacggcttcgagtcaggccgcctcgcccgtccttccgctcgggtccaactttacgcagcagccgtcgtcggtgagcgtaccgacgccggtcccggccaagggcgcgcttcagcagggtgtcgagaagaagccggcggccaaggcgggcggcgcgaagcgggggctcaagcggctgtgagccggaggctgcaaggagcgttttcacttggatgctctctttgtctgtgtggtggatgtgtgtccggcaagcaaagggctcgcatggccgttaggcattcaagtgcgcagagcaatgaatgcttggtttggagcaaagtgcaggtgcaagcagacgcgtcgcgtcggacccgccgcgcgcgagggatcggcggggcgcgcgcgacgacttcgacgaagctcgagcgcgcctctcctttctcccctcgacagcatcctccctcccccttcccttccttcgcccgccggtcgtcgcgtctctccctttccttctccccctcctactcctccttcctcgccatgtcgcgctttgctcttcttgctctcggcctggccgccgtcgccgacgctcacatgcaggtgagccctacccctcttcttgtggcctgtcgccgtcgcgtcctcctgacctgcctctctcgcagctcgcctaccctttcccgtacaactcgcccctcaacagcaacacgcccgaggccagcaaggactactcgatgacctcgccgctcgtcaacagcggcatctacccgtgcaaggtgcgtctccttcgattctactcccgcgcctcgaccgacaggagggctcaacccgctgacgcgcgctcgcctcttcccagggctacctcggtacggccgatcagggcccgcgcccgagctggacagctggcgagactgtcaaggtgtcgctcgctggcacagctgttcacggcggaggctgtgagtctgcttctctctattctgcgattggctcgacagggaaacaaggcacggcgcctgtcgcgaagggagggggcgcgcacaaggggggacgcctcgaccgacgccttgtttccaacctgccggaatcccctcttcgcctcgcacgcctcctcttcattcgtcggctgacctccttccttgctctcttcgcctcccagcctgccagtttggcctctcgtacgacaacggcaacaacttctacgttatcaagtcgtacatgggcggctgcccgtccgtcacctcggcctttgacgtcgagatccctgccgacgccccgaccggcgacggcgtcatgtgcgtctcaccccttcctcctctcttcctatcgctcccccgtccatgactgacagggaaacacttttccgtctctcgcagcttctcatggtcctggtttaacaaggtcggcaaccgcgagatgtacatgaactgcctctcggccagtgcgtgttccttctccctctctctcttccttcatccaacaaccctgactgatcgtccactcgtctctccccccccccccggcagacatcaaaggcactgctgcgtctgctctctcgggcccaaccattatggttgccaacgccaacgtcaactcgtgctcgacgaccgagggcacggccgtcgtctttgagtcgcccggcaacaatgtcgtctacatgggcgagtacgccggcctgagcattggcaacggcctgaccaagggcgccggcgtcgtcggttcgggctgctacgcgcctggcagcgtcggcgccggcagcggtggctcgccgaatcctcagccggctgtcacgtcgacccagcaggccgcggtgacgacgaccgccgaggctgccgctccttcgtccaagaccgcttccggattctttacctcggctgctgccttccagtcggctatcaacggcggtgccgacgtcggaggtaaccttatcgtcaagcccgacatctccttgccagccagccaggccgccacatcgtccaaggccgagacgacgtcgttcaaggcagcggccgctgcgacgacgaagacgaagacctcgtccaaggccgcggcagctgcgacgacgacctcgtccaagacggcagccgcgacgacggctccaggcactggccagtgcacgaccggcgactggaagtgcgtcggctcggtcctcacgcagtgcaaccacagcagctggctggccatcaccgactgcaacctccaggccggcaccgtctgctcggcctcgaccccgatcggctgcgtctggccgttccaggtcgtcagccgcaagcggggcctcgccgaccaccgggccaagcgccggctgcacgctcactaaagctctgttcacctggacctcgcatcgcaaccggaacacgcctacctcaagaatcatcatctaacgactcccttcctcacgccctctcccccgaccgaccaaccgacgacccgcgcgaccaaccactccccctctcgctccggcccgccttctctgtgagaggcgtggcttcgcccttaccgaggccgggcagtgcccgtgcctcgaacgagccgtcgtccgtcctagcgacgttgatgctcctcgcggcgtctgtctccgtccggccacggagaccgatgccaacccattgctgtacctggacgacgaggcgcaaggccccggctcggtgggaccggctccctccttctgtctctggccctcttaccctcttcgatctcgcagctctccccctcctggttgtccaacaccgccgccctttctcttgacgactcgtaacacgcacgctcggcatcgtctcaccccatccagcaactgtatcacaccccctccctagcgtcaccctccctcctcccccaaccttgaagagccctgcgcgcggctggccctgcacgcctctctctctctcttctcgctcgcttggccgccgtcgaaaggccgccgctctgtcgctacgcacacgtacatgtctgacgatgacctcccttcatgtgaagtcacgtcgcaccgcttcagagaaacgacggccggcgcgggctcttcggggcggatcgggcgcgcggaaagccggccgttccgttagcccgcgcgcaagcgtcgcctcagacgagccaactcgcaatctccgactgccctcgacctccaacaccctctctcctcctgccctctctacctccccttctgcgaccgatgctgtccctgtctgcctcccgccgcgtgtcgtccgtcgttgccgcgcgagtagcctattcttcctcgtcggttggctcctcggccgccgccgccgccgccgcctcgagctcgtcgagcaacccggtcaagccgccgtcgctgctctcgctcgccgacctgacgccgctccagatcacaaagatcatcaacaagtcggccaagttcaaggccgagtgccgctacccggcaaccggcgctggccggctcaataagacgctcgccgacaagacggtcgccctcctcttctcgaagcggagcacgcgcacgcgggtcgcgagcgagacgagcatcaagctcctcggcggccaccccatgtttctcggcagctcggacgtccagctcggcgtcaacgagagcctgaccgacacctcccggtgcgtctccatgatccggctcaggcagcggcgttggctgctgctgctgccgccgccgctctggccgaccgggcactggccggcccgcgctgacatgccctcctgactcgtccgccgccggtcacagcgtcctcggctcgatggtcgacggcatcatggctcgcgtcggcgaccactcggaggttgagacgctcgccaaggagtccaacgtgcccgttatcaacgccctgtcgtcgctctggcacccgacgcagacgctcgcgtcgctcctgacgctcgcccggatctataagggccggcagccgtcgacgacggccgacctggccgccgctgcgcccggcaagacggccaaggactcgtggtcggctctgctccaccaggacaagtcggtctcggacaccaaggctggccacacgaacccgctcgagtgcctcaagggcctcaaggttgcctgggtcggtgactgcaacaacgtcgtcaacgacatgatcgtcacctaccctcggcttggcatcgacctccgcgttgccgcgcccggcggcaaggatggcgattatggcctcgacccccgggtctggaagcagctgtgcgtttcgtctcagtcgtcctcggatgtcgcctgtcaacctcctagctttggttgctgacgccgccgctcccctctcttgccctgccagtgaggagtttggcgcgaccgacaaggttctcttcacctcgagcccggaggaggcgctcaagggcgccgacgttgtcgtcaccgacacgtggatctcgatgggccaggaggaggagagcgccaagcggctgaaggactttgccggcttccaggtgaccgagagtacgtccttcacccggccggctactgcggcgctactgtttttgaccttgccctgtcgtccttgcgttcgcagagctctgcaagcgggccggcgcctcgcccgactggaagttcatgcactgcctgcctcggcaccatgacgaggtcgatgacgaggtcttctacggcccgcgctcgaccgtctttgaggaggctgagaaccgcaagtggaccatcatgagcctcttccagtgcgtgtttggctttcttccgtctctcacacgcagagcatgttgctgatgctcccgctcgccccaacagctcgtacatgggcaagcgctccgtctaatcggtcgacgacaatgatctggccgccctcggcgctggggccgggggaagagttgtaccctaatcaaggcttgtatgcgcctcctgcatgtcgcgagtcgacgcagattgaggcgaaggggagggcaggcccgcaaccgcgacggctcagctagcgtcggcggagccttggctagagggatgctatatcactacactctctcgaccaacccttgcgccaggtccctcttcaggcagggcgagctgtgcgacctttgtcacgcgccgtcgtcttgcgtctcgcaagcacattggctcctgccaaaccgtcggcgcaacgacgacccgctccgagatcccttcgcccagcctcggcacatcggtgccgaccggcctacgtcgatctacagagcatcgctccaacagcagctccgtttcccatcgagccccccttggaacgtgtgagctggccgatggagaaggagcgcgcccgcgccagccgccttccatatcggcggccggataaaccctttcgcaacgatcgtatagcgcctgtcgccgtcggacgttcgggcgaagccaagaagacatgctgactggagtcgcgccatggtggctcagaccgtccggctgtggcgttcgtcgccgcccatcttgaccggcgtctgttcacccacctctagccctgacgaccgcatgctgaccagaagtacttgttgacggccgacatgagtgagctgattggctcacgccgtcatcagcgactgagtgatgtcggcagttgacggcagttgaaggcaacggcgctccaaaagatcaaccgcccggcgcatctggctcaaccgacctgccgattgcctgcggccgacgtaccgtcgtggagtccgacgatcctcaatcgtgcaccctttgcagcggaggcagtgacacgacacgactactgacggtcgcggaccttgcttattaccgctgctctcgaattgtgcttgccaactcggaggcctgggaacggtcgcgggtgccctcatctacggcacgcggggggtgccgcggggcacggccgcagctagtgcgagaaagggaggagagctgacgatgctgattgaccagtgtgtgtgcagaacggaacggccatccgtcgcaaactgcacgaaggaagacgaggaaggcgacgaaagtagtagccgcgacgttgggctcatatcggctacctggtcgtgacctgcgatgctgtagctgacgtcgataccttctttcgcttgaggataggtctctttcacctcagtctgcatcaaagggggaagatattaggcgagctggccgaaagaggtcgagaaaacccaggcaccgagaagacgggcgagcccgagtcgtcgaccggagaccgcgggcatggcgggcgacaggcgattgaggcgagaagacgtcagtgcgggaagagtggtcctgccttaggcggcggcgctgccatgcgagatgaggggccagcccgcgggagaggtcgaacgtgaggcgagatggaaagggagggtgtttcatggccatctgctcgaccagtcagcaccgccgtccccgcgggccctcgtgcgatggccgaggtcaaggccgaggcgagcgcacacagcagcagtcagcgggccggctcgacgtcggagcggagagacagcctcgcttgcgcaaggcgagcaggcaggcaagcgagctggtgcgaggcagctgacgtgcatactccttcggcgagtcgtcggcgcgatctgcaccagcagcaaggtcagcagcgcgatctgcagagcgcgagtctccgctgtcgtggatcgcgggaacgagggtgagaggaaagggaagaggccggtcgagaccgcgcgtcctgccggctaaggttcaaaggggcgtgcgcgcggcgattcagcgaatctcgcgcgggccggcgcccgtgcgcgcaagggagattaaacgcagagacataaagggagaggagcgaacgccacagtcagaccaacggctcgagccggccgcgtcctctaaccccggattaccggccggccgggtctggtcactctgctgcggttcctcgccctcccctcctaccccacgaggtaagcgagctctgttaggaggacgggtgaggtgaaagagagacaggacgtacaggcacggggcaagcgaggcagggcgtctgcaggctggcgcttcgtgtgagcggtggtggtgacgcaggagggatgggcaatagagagcgaggaaggagggcgaaggccggggtcgccggccgattgggctgacccgggaggcggggccagccgccccgtcgctgtcgatgcgtggagagcccttgctgctgcaagaaggtgggagccggccggatacccaggtcaaggagcggctcttgcctagcaaacgaacgcaagagagcgtcagagcgagcgagcgagcgagaaggatacctgcgtcgcttctcttcctgaccgcccaccttccctcgttcgctgtcattccctccgaaccgcactccgcccgcctcctcccttccccacctcccgcccggttgaccttgaactctactgccttcctgccgacctgctctctcctcaagcgttcttccgacgcctgtccctcgacccgcgcccgggtctcaccgcccctcgccccctcgtgtcttctgccttcgctcgaccctcgctcgacctcgacaggagcccctgccgtacaccggccccgccgactctccgagcgcggcttgcatccacgtcagtccggccagcccaaggccaggcagcacgcgtcttggcgcgtctatccgtatcctgacttgcctcctgcctccttcatatcccctcgttccgttctctatgctccggtcggatacgcgtgcagcgacacaggcgaaccggaccatcctccccgcttccgaatgtctgccgccgcgaccatcgcaccaccggccgatgagctgatcagcatgccggccggaccatctatcaccgatacgcttgctgttgctgccagcacagcgccgacagcgccgagcaagaggccgtcgcgtgccggcacgagctctggcagtcgaagcacgggcggaagtacaagtgccgccgccaatggctatcgcgtcgagccctcgttccgcggcatcctcgactcgacctacgacgccctgctcctcttcgagggaagccgccggggcgtcgttcctcgcatcaagcggcgcttgaccgaggagcagcgcgatgagctcatccagagcggctccatcttcgtgcgtgccctcctctcgcctcccggccggcgtcgcgacaagccgttccgcgcgccgcttgcttccgactcgctcgctcactcgttggccttctctgcatcgtccagatctttgaggaggaggagtcaggcatcaagcgctggacggatggcctcatctggtcgccatctcgcatccttggtgcgtgccgtcagccggctccggctcccttctatcgccgccggcgcgaccggccaacatgccgggccacccgaccggcacgtgtatttggcgcgacaaacgaaagctgacctggcccaactcttcatcttctgcctcttcctgtcgcggcgatcgtcaggcaattacctcgtctatcgtcagactgagcagcgcaagtcagtatgcctgtcgtgtcggcgcgcgcgcgctggcgccccttttgctcggccgaggagaacacgggctgatcaccaaacattcgcttcccgccctcgtctccagctcgcgcggtccccggtccggttcgaccagcaaggttgccgctcgtaagaaggccgccgccaaggccccaccgacgcctccatcgccgacgtctgagggtcgcaaaaaatactcgaccccggccgcgccggctgacatgagggaacccctcgtccgaccgcctgcaggtctcggccggaagtcgttctcgtcgacgccggtcggccttgacccggcatcgctgctcggcttgagtaccgcgcccggcaccgaaggcggtggcggcggccatctccagcagtactttcccgtccggccggcccggcgtcgcaaggacgacaacctgatggaagagagcgacgaggaggacacgcgcgacctcgaggagctgattcgtatcaaagagcgctcgctcgtcgggagcctgaccaactcgtacgccttcaaggagggagggctcgtcaagcgggtgagtgaagctcttcctctgaccgacagctgcggagggacgctgactgccgctcgggcaccctctaatagacgatgtcgttgcttatcggcggcaaaacgcagcacctcgtctcgtactacactctcgctgccggcatgaccgatcagctgcggacgccgtcgatgatgcccgaattcgccaacatggagatcgaccccgagctcgtccgtcccgcgtttcccccctactcttgccttgccttgcaaatctctgaccgacctctcgctcacccccgctctagctcgctaaagcccagttccgcttcccgccggtcgtcgagacgggattgggcggcgtcctgcgctacgtctctgaggccgacagcacacagtcacccgacccagagtcgccagaacccttgccaaaggctgttgctccgccggtcccggtcccgaccagtgctcaccggtactacgcccccccgtctggcctcctctcatcgagctacccggcggccggcatggccggacatccccttgtcgactcgagctatagcagcagtttgcatttcccggcctacagcatgcagctcgtcagcgacggctcgatgatcgcctacggcgccgcctcatactcgacatactctgctccggacgcagccccgcaccattggtcgtcgtcgctgccaaaggagttccatcatccggcggtgctggcatcgccgttccctcactaccagccgctgccgcccccgccagcccctcagcaacgtccgttagccacccatcgtagcaactcgatcagcaccactgccaaaacaggtgggcccggtcctcagcggcggcgccgggcgagccagacgtcgaccaccgcttcgactttggtgccagaaggccgccagccggctttgactggctcgcccttcggccagccgaatcgaccccttgccggcggcaagccgggcttccatccgtacgctatgccttcgccgaccgagggctggcaggcctatcacccatcgagcgcgcgatcgccgcagcacactggctcctcgacccggagctcatattttgacggcgagccctcagtctttgccgccggccctttatcgagcgctgttgcgagcacgccctcgtcggccggaagctcgctctcggccggatccggcggcggcgccatcctccaacaacaacagcagcagcatgcctcgtcgactctgacgccggcgatgcacaccactgcgctcggtcctcccggtgggtcggcgagcaagcggctcagccttagcatcggccgcgacaagaactacaacagcccccatcggcgtcggtcgccgtcgatgcagccttcaccactccgttcatcggcgcctctgcctctttacggcggcgaggtcgacccttacactcggtcggctttcccgcaccacgctgccgtcatgccgcagtacggcgcgcaggcggcctactcgaccttgtcaccgcgcgagctgccgggcggcgagccgaccttcaacacctcgtggatgacagcgccgcacgagcagtcttcggcctcgacgctgcaccagccgtacaccgagtactatgacgctccgccggaggccaacccgcagtcgaacccgctcggaacccactacggccctcggtcgtctccaccgcagtcgtcggtaccattctacagcggctcgtcgtctctcctgctcaatccgccgatgacgacgttcgctgaggacaagagatcggcgaccctcgcgctcgaccagctgcactttggctccatcggcggagctcccgacgacctggcttccgctagcggcgggcgcgagtaccagatcccgagcggtatggtcgccgcagacgatcggggcacttcgtttggcgattacaccctccaaccgcttcctcagtcgccagagcacatcgagcagcccgggccgcgctactgggccgcataaacctggctcccggcgccggccaacccccttgtcctaccccttccccgttccgctttcacgccttgttcacgaacgccccgtgccttagctcataactcgcctttcgcgcgcccgtcgtctccctgtcccgcctctggcccgatctgacggtcgccgagcgggcgctcggccgctctttccttgtcttgcaccatcgtccgctcgcgaatgtacccccgaccactgcctccgtccccattctttcccgatccctcacgctgtagctccggaagaccatcatgtcccttgttgcccgtcccacgactgccggcaaggtagaggcgacatgtgcatcaccagtcgtcgttggcgccagaccgctcctgcttcattagccgtgccttgccctcgttcttgcgctttgtcgtctttgcgttgcccatcttgccgggggcgacgcgcgagtggtgcttggcggccgcctgcgcgcgcgtccgcaccatttcagacgtgacagtgttgcggatgtcttccgaaccggggaggagcgaccgcgtcgagggcgcctgcgacggcggtgggcgagtcgtaaacgttaccttctggaaggccgatgcgaggacgggcatcgacgtcggcgagggcggggcgtcgctcgtcgtcggcagcggcgcaagagcgtcatcgccctcctcgtcctcctccgccgtccgggatgtcgatgccgtcggttgtggggcggcagacgccgacggcacctcctggttggcctcgcggatcaagcgagccatctcttgatcgcgcgtctcgcccttctcgtcggcctcgtcgacggccctgtcgtcctcatcgtcgtcatcctcgtcgtcgtcatcgtcttcgctctcctcactctcgtcctcgtcgctgctgccgtcacgctcctcgcggtcatcggccgcatgcttctgctcctcgctcatcatcttgcggagcttgccctcgtcgttggcgccccagccgctggcctcgaccgcaacgtcgagctcaaactttgcgaccgactcgtcggctagcgaggccttgaagcgcggatagtagggcgtctcgtagcggaagcggcggcggaagaaggtccggatgcaggcgacgtcgcggttgaagaacctgggagaaaggcagtaagagatgtcagtctgcatctctggacggaagtcaggacagtgcggcgacgaaccactcggcatccggatggctcgtgctgacacactgcggaaagtcgatgacgacgacctcgccctcctcgcggccgatcagaaggttgaactcgttgaagtcgccgtgaacgagtccggcccgggcaaagcggacgatgagcgccatgagctcggcgtagagctcgccgggagcctcgtgcgaggccagttgccggagcggataggcgtcgatgagcgacatgaggatggcgtgccgcgagtggtctatcggcgtcgggaccgggaagccagcctcgtgcaggacctgagcgtagaggtcgcaggctgtattcagcacggcgaaggagggttgagagggaaggaggcagcgagactgacgttgagaaaggcccactccttgtgcgcagccagtcgcgacatgtacatccagctcgcgctcttccgcttacccatgtagtcgcgcttctccttaatggcccggaaagaaatgcggccgagcctgaaggtcgtgtggaccagcgtcagctatttgggcgagacaggacgagccgcaagcgtcgcagagaaggccaggaggggaccgaccgatgcagcttcaggcactgcgagacgccctccttgtcctgtgtgatgtagatgtcactctccttgccgacgccaatctggttgccgacagcggcgatcgtgtcgcgcttcgtcatggcccgcatggccaggtagtcgtacccgccgtaggtcagccggtagccatcgtctggaggggtttgccgagccgagcgtcagcttcgtccaccagcacagcagagcacctggctcgcagacggtcctgccagagcgtcgaagccgggcgcacacttgatgttctggacgcgggcaatgaggttgcgcttggcgagctggcccataagcttgttgccgatgccgctgcggatgccggaaatgctcgcgatcagcgaggccggtacgacctcgtggttcttggagcccatctcggtctgcattgtggccagcagcgatgtagagtgagcaaggagtgacggagaggtgcatttaggaccggcagaggtcagggagaggagcagacgacgacgacgacggggtcagcccagtcgaggagagcggagcttcgaggggacaaagcgagagcttggaggagcaagaaggacgcacggccgtcaggattcggaactcatctgacgtcaggtaccggaggtcggtcgcgtcgagcttcatgattcgggaggcaactcgagaggaaggggtagggtcaggagggtcggtgtcgggcgctgcgtgccagctcgggtgccggtacgcgggcgaggccgcggctcagtccaaattccccaagtcgcatctgcagtttggccagcatgtgcaccgggcagacgccgacggaatgacttcactgcctcgctctaccttcccgagctgtcatgaggtagtgaaaggggggcatcatcgtcacggtggagaggagcgtggttcaggggcctcgagcaggaggactctgtctagctcggtgagggggattgggcgagtagccctggggcgcctagcgcatatgcgtgccccccttgcggaggcaaggggggtacgagaagcgaagcaagtggatctgaaagaaagggaagaaaaacatgcaggagtgggagagggaagtaagaaaactagtgcgcgggaatgagctgtaagggggagaggtcgtggggtgaagagtgatgagcccaggggccgccccacatgcgcgggcgcggaccttctagagacgaggcgatggtgttgcgagttgcgagagaaattgaaacacaggtttgagagggtgagaggagatatcgtgcagagaggaagagcgaagggaagagaaagagtatgcgactggtggccgagttttgcagtacagcagagccttgccgtatccgcgtgccgggcgagaggggagatcggtcgccgaggacgccggaggggggtatcgcgtcgggcggcggcggtgagacgtcgtccgatgagggaattgaccggaggaggtccgatgaggcgaagcggaaacaggtgatgaaggagagcaattggaacagcctcctcttcacgcggtcgccgtcttgacaacctcacgcgtccagcgggccgtcttgcgcgtctcggtcgacatgcccttgccgcggcccgacttgagggcgttggcgatccactcctggagaaggagctccttgatctgaccctgcgaaaaggtgtcggccaggtcgccgagcaggccaaggccgccccggacgaccgcctcggaccggtcctcgtcctcgatcgcgagctggaggaagttgagcatgacgggcacgtaggacagaatgaggtctgcagaggaatgatcaagtcagcggcgtcgacgacagggcaagacatgcggcgaagcaactcactcggctcgttgctgcggaaggccgagatgacgccaacgtaggcctcgatgatggcctcgcgaaggagcgtgacgtactcaacgagctcaaacgaggcgtcgggccgcataaggccggcctgctcgaggacggccatgaccgtctcgaggtaagggcggaaggccgggccgatcgcgagcgcaatgtcgccaaaggctgagaggatcggcggcttgacggaccggttgagcgtgtcgctctgaaggttcttgaggagcgccgtcatgaagtcgtcgcagtactgggccgactggtcgccgagcgcgcggcagatgtcgccaatcaggccgacggcgatcgagcatagctggtactcctcctgggcctggagcgcggtcgagaggtagggcatgaaggccgagatgtaagggtggaagtcgtgctcgagcgccgaggtgacggagccgatcgcgaggagggcgtcctcaaagacggtcgcctgtttgcccgcgctgtcgcagagcgagagcagaaccgtcatgatgcggtccgagagcggccggatctcgcggccgagcttgcggacaatcgaggtaacgaccgagcagaggttgccctgaagctcgttccagttgttgcggtcgtccgagccgacaatttggttctgcatgccgagcaagctctccatccgagcgaggacctcgagggtcacctgcgagacgatcggcagcgtatcggtcgccgactgggcgacataggccgagatggcctcgtaagccgacgtccgggcgttggcctcgttcgtctgggcgtacttctgcgagacgcgcatcagggccgagaggatgtgctcgtagtagggcgagagcggcgtcgtctgcggcagcggctcgtccatgcccgtgccgagctgctcggccaaattcatgagcgaccagcagcagttgccgacgatccgcgtgccgtcctcgagcccgccgacgagcgcctggatgagcggaggcaggtggacatcgggcttgatgcagtcgatcaggatgtcggacacccggccgagcgtccacgccgtcgtgtccttgacgtgctcgttcgggtcctgcatcatctcgatgagcgtcggcagggcctgggcgacgaggccgctgagcaccttggggtccgggccgtcgaggatcgagccaaaggccatgacggccgcctcgcgcttgcgccagccctcctcctcggccgacttgatgttggcctcgacaaagggaatgacgccggcaacgacgtcgtcgccgaccgtctgggcgagaagcgctaggcaggtcgaggccgccatcgagacgttccactcatcgtcctcggcgtcctcctcctgctgggtcaggagctggagcaggaccggcaggatctggctcagcgccaccttagcaaagtccttggactcgcggtccggcgcctcgttgaactcggccgcctcggaagcctcgaggttgagctcgatctcctcgtcgcagacggtcgaccaaaactcgatcgcctggagcgcaatcttctcctccgggttgcgcatgccgagcacggtaagctaaagcagagagagggaaagaaatgtcagccagggtgaaccgcggcggctgcaagaagttcagcaacacgcacgccaaagagagcctgctccatatagaagcccatcttgtcgtagtagagctgcatgatcttgaccaggcactcgaacgcgccgacgacgaccggtatgctctggctctgggtcgcctcgcacacgacctgcatgatgtagttgcgctcgccctcgcgctccatattttcgcgcacaaactcgagtgaattgaaaagggcgttgatggcggcgttctggacctcgaccgatggctcctccttgcgcgctccctgaacaacggccgtcaggatctcgttcgactggcttgtcaggatctcgggcttctacgaacggacgcgcaaagaaggcaccaggggagttagagggtcagcgaacagctcagacgatagcgacagtcgatagaagaagagagacggaccactgcctcgcagatgaaaccgatcgcctggagactcgaaccgcggagaccggcgttcgactcgtcaccgacaaactgaagcaggtagccgatgagctcgggccactgtccggcaggcaggtcgacggcggcgatggcggcaacgacctgggcggcgaacgcgcctgcccgattgacgggcgagcccagcgtctgaagtgcctgctgcttgacctgctgcttgatttccggctgcagcgacagccagcgctggctgatatcgttctggcgggacgggtcctgccaaaggtgagaggagaggtgtcagcaggtttaggtggcaagacgctcttctctggcacggccagcataaagggacgaacccgggcggtgagtgcattcttgatcgcaagggcggcggcattccggaccgaaagatcggcaccctcgctcgcgagctgctcaatgagcgtgccgacatagccggtctagcgaagcggaagatgttcaagccagtcagtgacagatgcgacgggcagcatcgtcgggagcgacctggcatcgacgcacaaagttctcgttggcaaccttctcgagctgctcctcggcggcctggcgcgtggcctggtctgtgtttgtgtcgggcacggatcgagaatgacggcagcgcagagagttgggaggacagcggcaacgagatatggaggcgagttgagccgggagccggacgagggggagcaaagggttggacgacgaggatggcgcgcgcgaaggaaaaagcaagacgggaagcgagagaggcaaggcagacgagaggacgacgtcagccgcagggttcggcgaaggatgcctttgctgacatcaagagtggcgcaaggcctgctccaggagggagatgtcatccaagccggccaggacgaggccttgggcgtgacgacggccggctgcccagggagcagggagggggatggagcctggcgagggcagacgcaccgggcgagagcgagttcgacaggagttgaccggcgtccatcgtgagaagaagagggtttttttttttgggcgaaactagtagcgagggtagtagcgagggtcctcttcgcttggggcttcgcttgaggcgggcgtgatgtacaaggagaaggagggttgggcggatcgatgggagagggctggccagctaggtagggggggtcgagccggacgagccgccgccggagagagccaactcgcgcctgcaagttggagtctcgccgcccgaagtcaacgagagcgactgaccggcactccttcttcgtcgcaagcagcaatcgtatctgaataagtcctgtcgctgggttggcagctctgatgctaacggtcggtagatggcaggtatgtcatcgggggctggacgtctctcggcgcgctgccaggagcctctgcgcgaataggatgactccattgaagacggcccccttccagaagcccggattgtaggcgtgcctctgccactcgaggcactcaagccggttccgcttgggtcttggacgagaagcgagaacgacggcaaaaaggccgattcagggaggcctgggcggcatctggtcgggccgccgacgattggtgaccgacgaacctcgttgcaagacggccgcgtcgtgaggtcgactgcacgtagctccggatcgaagagatgctggtacgctcagccgacacggaggatgagcccgagcaacgcgagctcgagcgcgccaacaagaaggccaaagacgagaacgacgggcccggccggttcaaacgcttctctcccagagccaagcccttgcaggcccccgacttgctcaagaccgccaccgggatgtacgtctgagcgcggtccattggctgcgattgatctcgcttgatctgtcgggagaagcgccacgcgtgttgtcgtcttgacatccttacgcgcgtattgcgccccagagagcgtcgaacgccgaagtctgggcaacgccggccgggtggcgagtagcggcgacgagggcgatagaatcgaccgttgcgtctttgtcgaccggcggagcgaggctccgagcaaggcgagtgaaaggagcgtgtagagaaggccgactgcgcgcggcggtgggcaggagcgaaagggttagcgcacggtcggtggaggccgtccaccgcatgcagagcgcaacaggagcctaccagacgggggagggggacgtactgccaaagaagcgacgatcaaagaccttgagcacgacggccgcgtagccgaggttagcgagagccgtcctcagccaggcgccctgatacgtccgctgagaggcccgaaggtcgacgagctcggaagatgtgagctctggctggtctaaaacgctcgggtcgaccgcattctgcgtggcagcgacgacggtcatcgagcgtcgtcggacgagtttgctgggagcaagcttgacggcgggtcgcgccaggcaggaggtacgatgggtcgcaggttgtgcaggttgacgggcttgacgagagacgaggagcggcccagatgtcgggtgagcgcaatgctgagccgatgtcgagtgccggcggtgaggtagatgagagcaaagagctgggttctcgagcgaggtgaccgtcgagcaaggtggccgtcgccatcgtcgggtcgtcgcccgcgacgccgcgcagctgccggaggacggagccggctggagggcgggctggaccctaccaacagcctccaggaagcacgggaagaaaggttgcatataggccctgtcagccttagctggcctctccagctctcggtgcgacgggtaggtgtacgagggctgatctgaaggccacaaggaccgacttggccgggcacggcgcaggccgaaagccgtcccacgcgggcttctttctgctctgcctgaccatctctgtcttcctctccctcgaaccaccatcttgccctccgatgcaactgcccgcgatgtcgacctctagctctaccagccccaaggaggctctcgcctttgtcgactttgtcaacgcctgcccgacacccttccacgccgtcgcccgcggagccgaaaagctcgaggccgccggctttgtccgtcctactcctccctgtcgctgctcctgtcctgcctcacctgacttccctttgctcgcttctccagaccaaaatccatgagcgcgactcttgggttggcctcaaggccggcaagtcgtactattttcaccgcaacgcctcggccctgatcgccttccacctgcccgaaggctacacctcggcctcgccgctcgcgcttgtcgcgacccacgtcgactcgtgcgcgctcaaggtctgtctgcgagagcccctcagcagaggtctgtcacacgctgacctccctcatctctcgcctcaagatccgacctgtctctaagaacgccaaagagggctgggaacggctcgccgtcgagacgtacggcggaggcatatgtaagtcggcgcagctccatatccagtcgcgcaagacggtctggctgacactttggctgctacagggcgcacatggtgggaccgggacctaggtgttgccggccgtgtcgtctgccgcgtcccggcggcggccggctccgactcgggcgaccgctgggagggccggctcgtcaagctcgacaaggccgtcgcccggatcccgtcgcttgcgatccacctcgacccggcacgcgactctttcacctttaacaaggagacgcagctctacccgctgctcggcctctcgtcgctcctgaacgcgcctgttcccgctggtgccgaagttgctacgacggccggcgtgaccgacccgatggccggcaagcaccacccggccctcctgtcgctcgtggcaaaggagctcggcgtcgccgtcgaggacattgccgactttgagctccagctgtttgatctccagccggcagccatcggcggcctggccgacgagctgatcctcgccggccggatcgacaacctcatgtcgtccttctgcgcgctcgagggcctgatcgccgcctcgtcggcgtcctcgcatggcagcgccaagggagttccaaccgcccaggcgatccttctcttcgacaacgaggaggtcggcagcgtctcgcaccagggcgccgagtcatcgctccttcccaacctggccgctcgactcgccgccgccggcatcggccgctcgaaggacgacgcccccgtccgagctgaggaggtcctcgcgcgcagcttcctcgtcagcgcagacatgggtcacggtcagtccaaccagaaaggcgaccggtcctggaacgtccctggaagctaacaaacgtcccttcgcttttgacaggcgtccacccgaactaccccgagaagcaccatgtaccgcccgttcaccgctcgttcactcagtccctgcatgtactgacgaaccatcccatccttacaggacctgcacaagcccatgctcggcggcggcgtcgtcatcaaggtgcgtcgctcgccaagacgcggtccatggcctcgtttactactcaccgcctgctgcctgccggccccgcattcgtactgcctcagacgaacgccaaccagcgctacacgtcgaacgctgcgacgacgttcgttctccggcgcctcgctcatcttgcaggtgtgccggtccaggagtttgaggtccggaacgacgtgcgtcttgcgactcttcaacttgctcattcgaaccgttcaactgacgagactagccacccttgactcttcagagcgcctgcggctcaaccgtggggcccgggctcagcactgttgtccgcacggtcgacatgtgcgtcacgggctttcctttctccgaccgtcgttttgacagctgacgggccctcttcctttcccttgcagtggcctcgctcagctcagcatgcactcgattcgcgagacggccggcgtggcggacgtcaagcattacattgactttatggccgccttcctcagccgcttcggcgaggtcgacggcgcgctcacgatcgactagagtgtctttgcttggacccctttcgcggccacgactcccagtggatgtcaagactctgcgtgcggcgtgaacgaaggacgcatgacagagagggcgggggcataaggtcgttacaggagacagtagaggagtcgccaaagtaaagagaaaagcaagtgggaggatgcggggcgagcgagcgaggatggcgaagcaaagccagcttacgcgacgccctgctggtcgtcgaggccctcgatccaggcacctccgacgagctcccagccgacgcggcgctcctcgtccggtccgagccagccgaccggccagtcggcgagctctgcctcgggcacagcgagcggtgagagagaggaggctgggtagacgacgcgccgcgccatccggagctgcaggatatggcggaggatttccgacatctctagccgatccaagacggggaaaagcatctgacggagggcggcctagcgacaaatgaatcaaaatgtcagcactggccgactaaaagagggaagaccgtggctcagcgcacctcggtgatgcctgaccggtcgaggaggtagccgacgacgagtcggacgcagccgtcccagtcggcctcgacgacgtgggcattcatgtcgacccaccggcgcggccagacaatgaccttgctgagctcgtcgacgggcgcgtcctcctctgccgcctcgcccggcggaggaggtcgattcgacttcggaacgaaggcggcccaggaggggatgtagagcgtcgagacgagacgaggcatgtcgtagccagtaacgaaaacgagcgggggtgtcgtctcggcgagctcgagcgtcagatggacgacctcctcgagtgcgagctcggggcacagggcctaaagcgaaagagccgcgctcgtcagcactcgccagttatcagagcgcaaatacgtttgatgcgaccgacctggatgacaacccacgtcgcaccgtcgccgccgatctcctgaaggtcgaggtagttgacgatgcgcttgccgatccccatcagaccggccggatcgtcttctgtcagcgagtcgaggacggccgtgcgcgcctcgacgtcgagcgcgatcggtccaatgtcgaggtcgaaggacggcgggatgctgacgacggccgagacgtctggcttggcggccgtcagccgggcagagatgtggaactcgagcgcctcgtcgtctgattcaatgggattgaggcgtcagtctgagtccgctgagcagcctcagcctcggtcggaaacgcaccgagcttcttcgagttgcgcagtgtggcgccggcgcagagcgtcttgagatcctcctgctcggtctcgagctcgacctgagtaggcgggacggggtgatggtcagtcattcagacggcgtcaagcgggagaaggaggacggtgcaccgacccgattgccggatgagaactggaggagtgcggccgtgtgtccgtccgaggcgaggagcggccagagcgtgtgctcctccttgatgagcaggccgccattctgaccagagccctccacctcggcggcctcggtgaagaaggaggcagggtgcgggccgacggaaaaggcgttgaacctgccggagggagagtgcaggaggttcagacgagcgctggcattcgcggaacgagcgagcagcgacgcactggtccgtaaaaccgatccggccgttgacctcgtcgctccggctgtcacacacgccctcaagaatgaggtcgcgaatgatctcgcccgagcggcccgtctttggcaggacggcgtcggcctgatgcgaatcaaagtcggcgtcccgcgtcgagcagaccatctgccgaagagggaaagtgactggcaatcagcctctcatagtcgacagccgagcctgtgctggcacttgccttgacggtgctcgccaggacgctgtcctcacgccggcccgggccggcctcggcgatcagagttgcggacgagggtgcgatgaggaagaggttgttgcgcgacgcgagctccgacaggtcatccgagagcgtctgcttgggcatgtggagccacgagtagtcaaaggcgtcggcgatgacattgacattgtcctcgagtttgagcgccgccatcgcgccgacggcgcccggcaggtcgggcacgcgtgactcctgctcgccctcgacctggctaacgtcagcgttggtccgcctgcgacgagggtggcggttcgcgtcagcgaaagattcttcgaattctcatgcgaccgtcgaggcacgcacaggatggccttgtcgacattcttgcggaagaagcgcaggtggtggtgaatgtcaaagtcgcctcgcttgtgctttgggtcggggaggaggtcagtgttgccaacggcgttccacattcggaggtaggccgactgaagctggtagatgtaggagccgtgcgtgtcctggagcttatggaagcggttccggattgtcgtcgtcgtcacgcccttgacaatcttgagcgccggcgtccacgagtacatgtagcccggtgcgctgccgcggacactgacaatgctgccaatgtccatgatgacgtcgtcgagctcgtcgttgtgccgcgtccggtgccgttgggcgtcggagcctgcgcgggcgaaaagaggtcagcccggcggagtcgagtgcctccgggaagaagccgccggccacaacgcaccagccgtgcgcccgacctggttgacaatgtcggggatcaggcccttgtcctccgggaggacggcgacatagttgtgctcgaccggcggcggtggtggcagctccactgcctcggccgccttctgggcggcagcggccgccacaacgtcttcctcggttgccgcaccggcagcggccgcccttttcgacgccagctttgctcgcttctctttctcctcggcggtcgggaagatccactggccggcgagctcgccggtgcggcgcttgcccttgtcgctccgctccttccgcgggagcccagagggcttggctttggacctcgactttggctcgcccttatttcgccagacgttggcgcctaggtcgagctcgacgacctcctttcgtagcttccggcgctccgctttggcggcgttggcctcctgctgcttccgccgcaggcgggcccgggcatcctcgaccggcggcgctggcccgttgaccatgaagtcgggcgagtccgtcgtcgacatcagcggcaaattgaggcctgcgacggatggcccgggggcgactagggcaacagactgggacatggcggagcggccgtcgagcgcctcatcctcaacggctgatggcgtggcctggatgtctgacgtccgcgggagcgggtgcctgaacgttttgcgcgatgcccgcctcgagccaggcgtcgccgccacagccgactgcgcctccaaggtcgacggcgaaggccgaggctcgatcaggagagtgtccaccgtcgaagtcgacgctgcagagagcgatggctcgagcggcagcagtgcaggtgaggctgcagcgggcgcaggcgcgggtacgggcggaggctgcgaggacgaagcgcggtcggcagctttcgacttgcgccgaaccttgcgcggtcgagcctccgtctccgagagtgagaactcggcaccgaagggaggtgctgggggcgggagcagcggcgccggaggtgcaaggtctggctccttgaagccggatgacatgctaggtggagctgagagcgcgaccagcgggacctcgctctgactgagagttgacttgcgaggggccttggcgggacccttcttgcgcgcgggcgtcttgacgcctgttgagctcgccgcgccgtcgtcggtctcggtgccggtcggtgcggccgaccggttgcgcttctttttgacgggggtcggcgcagggctctgcgagggaccagccggagcgaccgaggcggcagacgacgtgaccgatgacgagcggcggcgcttgacgcccggccgagggggcagcgtcaggccaatcttctcggctcgctgggacatcagccggtagttggctgcgtccgctggcggcgcctcgtcgcccgccatgatgcgctgcagttttgcgattgtcgccttctgcaggccttggccgggcttgcgtacggcggccgggcccttgctcttggcggccgggcccttgctcttgtacgtcccgagccactcgccatcgacagggcagccgaaaagtgcgcgcagggccctcttgttgattcggttgccctcgcccgccgagatcgggaggaacgacagcaggtccttgggcccgagcgtcgcgttccggaccggctcgagcgggtacgactcggcccactcgatctgctgctgcggctcgtcccagagctcaaactcggcgagcgagaggaagccgccggcgtcgagcgcactctcgggagggcagacagccggatcaattgggtgctcgagctgctcgcagagcgcccggtagttgcgcgtgccaaagaggacgaggcggcgctccttgccgacctggtccgagacctggatgatgctcgtctggggcaggtgaggcggcgtgccctcccttggcgcccaccggtcggcgatccactcgatgaagcgccggccgtaggcaaaatgccgcatgatgtcctggaagcatgtccccgaaaaggcggggttagccaagcggcacctgctgtctgctcgttgcttgaggcaggttcgcaccttgtaggtccgcccgttcgtgccgcctccgaggatgtactgcaggatctggtagtcgaccgtggtcgagctgccgatccgactggccggctcgaagcgcggaggcggctgctcgggctctgcttctgacgggtctgagtcgccggcaaatgccgcgtcagtgtccttgcccatcctgtcagcgagagagagcaggagaggacagactgcattggacgactgccatgccgtcaccatcagcgccctcgtcgccgatgagcggcttcaagtcgccggcctggccgtcgtcgaggccgagctcggcgaccgagacttcgatgtcgaccgtgctcgcgtccctgctgtcgacccgtgacatcgcctgataagcggcgatcaagccctttgcgtacttggccgtcgtgttgcggacattgatgcgccggatcttaccgctggccatgagcgctcgaatcagccgcttgactgtgcggccgaccgtggagtcgatccgtccacggtagccctgatgaggggagaccggtcgagcgagggtgagcgcgggagcgcgagcggatgttgaagtgcagagaaggcgcaccatctgccgcaggagaaagccgtccgtgccccagagctggagcgtgcgcaggacgcccttgggctgcgcctcaaagacggccatcgccttgggctcgaggatctcgtaattgttgaggaagcggcggtgaagctgtggctgctcggccgaaggcttggtcgcgctgctttcgctgcgcgccgcaaaacggtggtgggtaaagtggatcgtgtgggcgccgccctcggtgcttcccatcttgatgctggacgatgggagtcgggcgtctgataggtcagcaggaaccaacgcaatgtaacagagagagattgagcagacgcacacgagctcctcggagacaagccgcttggtgtggtagaaggtgtccttgggcgcgaggttgtactgccgactgagtgagacgccagagatgccagcaggccccatgctcgagattgtgctgaggatgctgagcgtcaggtcggcgaaggtcaggtactggggcgtccgcaacgcatggcaaacggggtgaagggcgaccgtcagccgtcggcagccgcagcagctcgggctcagcaaggcaagggcgacgcacctcccgccgctggccggcgacgacgaggcaggccgcatcttctgtgagccggatggcgagattggcgccgtgctcggttcggagggcgtcgaggccgacctcagcgtactcctctcggctgacctcgtgccgggccgagccgttagcagcgtcctctggcgacgggccgaccgagagctggacgtcgtcgtgctcaagcagaacgccgagcaggtagctgatgtagggcggatcgagcatctgggtgaactgggcagccgaacgccggcgacccggcgccaaggtcgagctcccggcggcagagagaagggtctgcgcctggatgtcgaagaagtcttgggcgaggccggcaatcttgtccggatggatgcctggcggaagagcggcgggtcagctcagagtgatctggtgcataagcccatgctgagttcgaccagggagacgcaccgaccgtgccctggaagccaatctcgtggacgaggtgcctgacgagcgaatcgagcatggtcggggcaggcagccgtgggccgaactacgaaacgtccccttgaaccgcctggtccttgagattgaagcgagtaggaccgagaccccggtacggtatgggccaatggatgggttcgctaaggatgcgtgatcggtcgaaggtctaagtcgagggtgatggagagacgggaaggcgacgcgccctgctctgtgcgacggaagcggagtcctcgacgacgcgaccttgagcacttgcggtccctcgtctgcccacacgctctcgacctgtcaggacaagggcgagcagctcttgtactagtgcctgactatcatgctcgggtcctcgggcctgatgaaggttgcaccgcaaaaatatgaacgacgaggccgaccggccgtaccacccgggccgcgctgatagtccccgtcctctgccggcgctgcaggtgtgtgtgtgttcttttcatcggtgaggaagcgttttgagagtacactggtttggaaaagtaaggaagggagagaaactgcgagagataaggggctctttgagagggggtgtggggtcacgagatgacagcggcgcacgggccgaaatcaccgtcgccccgtccgggctttcctttgggcagtttggactagaatctcgcctgcgcagcccgcctgggctattcctctcgactcgtaccagaggcggcgccatgtaaagccttgacggaaatgcctgaacagtccgtccacgacaagagcagcagtgcttgttcatgggaggccaggccaaaaaaacaggggttgggcgacccttgtttggcttggcctgcggccgagaatgcatgccacgcgaaagagaagcagtaggccagcccaaggagtgatcaggaagtcacgtcaacaacgaacgacgagggcgggcaacagccgaaaggactaccagcagagccgtgcaagcgactgctcgacctggcctactgctgctgcttcgtacgtgcatccgacggtcaagtcgacatttttggggtcgtcgccccctccgaggcgggaccatcttgctcgcctcatgggctgctgcggtgggcgtctctgttgcctcgacagcgcaggcagcagaaaagcatgacttcattcctgcaacgcctctcggagagacaaggccacggcagaggagccggcaggagatgagagatgtcgaaagcgagcagcgacctggaagagaggcggttgtcgtcggtcggtcccgccgatcccttcacttttacatccagcgagcgagagtgacgacggagagacgcctgcaagcaagcattggaccgccttcacacgagacgacagagagcccgcgcctcccctcgcctgcccacgagaagcagccgtcgacgaccgaacaacgaagccggtctctcaacatcctgaacctcgaccctctccagcggccagcccctgcgccagcagcagcagctctcgcaccgaacccgtgcacctcgcccgcccgccctcctgcaccggctacctcggtctcttgacgtccagaccctctcggcgacgccgtgaaccctctggcagcccatcgacgacacccgccctcggccgccgtcaaaagcactcgccgtcgtccagacgtgaacaagcctcggttggtgccgccccgacgcgccggtccgtccgcctttcagcctcatcggtcgcctcggagacctcatccgttgcgtcgtgctgatcgtcttcctacccggtcgcttcaccctcgtctctcgccctctcgcccacttgctctctcttcagtctcccctcatccctgatcatcctcgacgcgtccgacgttacccggctcggtagactgcacctgtgcgtggaaggcgtcgctctgcattgaccaggccgaggcgaggtcgcgccctctcaagctttgacgactgatgacctcgtcctcccccttcaacccgtgtcgttcaacgaaggacgcatcccgtcgctcgcccgcgagctctgtgctgagcgagaccgccgtcgtcaaccgccgcccagacatgcccgagcccctcgtctacagctcgtctgtcgagctcgacgaggccggctcgccccagcggagctcgtaccagccctacccggcgccttaccggacaaagggaccgaccgcccacccgccggcaccggccctcgttcgcttgccgtccgacgcgagcacgtcctctctgcctgacccgacggcgttcccgctctcacaagagtatcgctttgatggcggctcccaggtcggatcgagcgcggcctcggtctcgtccggcggcggctggcgaccaccacggtcatcggcccgcgacagcggcgccagctttggcgactattcggccgctggcggtccgagtgagcgtcggagcgcgtacgaagaacgtgacttgcccgaggaggagtctgaggaggacgccgtcgaggatatgcgctcaacacgagctgactcggttggaagcgcgagcagcagcggcagcgtccactacaatcgctactcagcgcagcctgcctggacaactcggcctcatcgctcgcagccttcgacgagtgggctgccgggccagtcgtcgccttctgcagcgtcgtcgccaggccaaccgcctccgcctctacccgtcgtcggcctcggcttcagtgcgccctcgccttcttcggcccagccatcaggtcgggctggaacaggcgcctacgcttcacgcgagtcgtcggccacgtcgccttcggccggcggctcgcgctggagtcagtccttctcgcactcggctgcaagctcgacatgcgatcacgttgtcccatacgactcggaggacgacaagagcgacgacggtacgagcgagacgagccagtacggctgggagagcagcgagcagcaccgagccgacatggccgagggcgccgccgtgatcctcgtcgaagatggccgaggcaaggtcgtcaagggcgacgccatggacatgacccggtcggaccggctaaaggtcgagctcgctggtgcgttcccttcgccttcgctcagctgtcatgcggtcctgctgattgcaacgaccttcttctcactcaggctccacccatctgctcctgtcgtcgacgccgacacccgaactcgtgccggcctttctgcgcgaggtcctcccgaccttggcgggatcggtcgtcgtgctcgacatcgccggttgcaagctgtcgacgtttcccgtcgaaatccttcttctcagcaacctcgaagagctcgacgtctcgcgcaacccgctccggtcgctcccggccgcgctcggccagcttcactcgctccgcgtgcttgcagcgaacggcatcggctccagcagcttgccggctgacctcggccagctgccgtgcttgcacacgctcagcctgcgcgacaaccgcttctactctcttccgcgctggctctgtctcctcgccaacctcgagaccctcctcgttgagggcaaccccttccagggcttctgggccgactttatcaagtggcgcattctccagtggtcgcctctcgttgccgacacaagcccaaacgagtcgcgcgactcgttcttctcagccgcgtcgtcgcatccgtacgctcagagcccgtcgcctgaggtctcgcgacggccgagctcacgagcctcgccggtctcactccggcggccggaccaccagcggtcgtcctcgtcggcgtcgtctttcgatcagcacggcacgctcaacgccaaccggtacggccagcgaccgtcgctaccatcgagcttctcctcgccctggccaaatccgtcgtcctcgccgaaggccgtctcgcccggccgtgcgcgtgccaacacgacgttccagtcggactacgccttcccctcgccgtcgcctccggtccagtcgccgccagcgcgggcctccatcgcgccgaccgatggtctttctctgccgtcgacgattggccgagccccaatcaggcggatgaagagcgcgggtgctctcttccaagccgccgtcgacggcttccgaccctccgccgagccggtgccgtctctgccaggcgctggcccggccgaccaaccgcaccgacctgggccgacgggccgttttgtctcgcttggcaaagagaaaggtcgggcagcgagcgccggctaccgcaaggcatcggacggcgccgtcgaggtccttcaggacgagagcaccgacccatcaccgcctgtcagtcggcgcgtgtcgggtgagaaggacaagggcaagttccgaacaatgttcaagaagatgagcatgggccggatgagaagcggcagcggaacgggctcggccctccggcctccaggcccgcatcacctgcactcggcgccgagcgtaccgagtctgccgctgggctcgcggccgacgtcgcgccggccgagcacctcgcaaggctactcgtcgtcgtcgcagagcaacgtcgactcggattacaccgacagccgtgggccgtcgccctctagtttccagctgctctctggctcgcacgtcggcccgtccccgggcatgtttgaggctagtcggacggcgcccaaggccaagcggcggagctacctcaattttgacggcgcaacgccctcgctcaatgccatcagcatcccgagcacgtccccgttcatgtcgaacgcctttctctcagtcgatcgcgccttcttcccaaccccttcggagatcgttgaagaggacgcccactcgatcctcgagagctatcacgccccttcgccggcggcctcacccatcatgccccaggacccggaaccctccactgcatcggcgccaccgcccgacaacgacaaggagctcctccggcgccggatgtacgctgaaggtcttgggcagatcatggcctacctccaggacctgcacgacctctcgctcactccggtccacccgcccgtcgtcaccgcgaccgacgctgcgagcgaccggtcgcccatttcgccctcgcgagcctcttctgcggaaccgacaggcccaggcgcgctagtttccaccccatcgacatcgactttggcaagcggtgcgagtcgaacgacgccgcgtcttgctccaggctcgataccgggcggcagcgacgacgccgacgcgcgcgtcatctcgatggtcgacagcgatcgctctgaaggctctggcctccggtacaagagcgacggccggaagcgggcccgtgtcctgatggagatcatctcgtacatccttctcgctgtcggctggctcatgtcccggtctggtcgacgctgacctttttcactgctgccctttgcaattggcaggactgaagagacctatgtcaagggcctacgcgatctcattcacctctacgtccgtccctccgaggctccggtccctggcacgcgcgagacggtcatccccgcggccgagcgcaagatcgtcttcaacggcctggtcggcctcctccagttccatcaggacagcttcttgccgagcttgcgcaaggcagcccagccagtgctcgacgactgggagcgcgcccaggtcgacgacggcctctcgctcgcggccgccctccaggtggccgacgtcttccgctgctacaaccctttcatgcggatgtacagcacctacatcaagtaagtagtcgggcctgtcgaagcgcctcaccgcgcgccgagactgacagccagtttgtgcctccttgcagcggcttcgacaatgcgctccttcgcctgcgatcgtggactgagctcgcgacgggaacgccgcgctcgggctttacgtcgcccggggcaagcagcccgcacgttgtcacgatgggcctctcgctcggagccatggcctcgcccagcccgtctgatccttcgactggcggcgcctctctgtcgactgctcagcgcagaagggtcaagcacttcctcagggtacgggccgtcaattcttgatcattgtctgcgttctgcgtttttaacgccgcagccacccgatattgccctcctacaggatgcccaagcgcactcgaaacacacgcagatcaacctcgaatcgtatctgctcctgccaatccagcgcattccgcgatacaaaatgctggtcagtctggctctcgaggtgaagccgaccttcggcttacacagattctgaccgaatcgcgcgtccttccacagctcgagcagctctgccaatgcacgccaccgagggcggaggacgacaactacattctcgaagacgtcgcgcttgacatcgctgcgctcgcctcatccatgaacgaggagaagcgcgagtctgagtcgcggcagcgcctcgtccagtcggtcccctcctcatcgcttcgcacgcccttcagccgactcgcgacttaccctcttctgctaaaccctgcagatggcaatctcgcatcaccggcaagttcccgtcgccactcgtccagccgcaccgcaagctcctgctcgacgggacgctcgtcctccagaagttcatcaagcgcgtcacccactttgtcgaggtcgtcgagcccgcgatcgacgacggcgacaacacgattgttcctgccaagaggagcgtcgtgccggtcgaggtcctcgagagctccgactcgggcctccagaaggtcgtcgtcgttctcacgagcgacctcatgattctttgccagatgggcgtcggccaagatccggaagggccggtggacctctatgccgtcctgcggctgcagaccaagcctcagccggcaagcattctcccggggacgagtcgcagtgcgtccagacctgcccaccctctcttctcggcggaagctgacccttatatgtcgcagccatccgcgtcgtcgacgacaaggccatcctctacctcgaggctcccaatacgagcgccgctctcacctgggtcaagagtgcgtcttgctctatctctacgtcacgaggttgtacgctctgctgaccagtcaccctcgacctgcagccctaaacgaacagttccagcagtcgcgctaggccccctccctcccttattctttcgtcagcctcgcagcacacacacacattttgttcgcctttgcttcctcgcacacgccattgcctctcggttcagcatgcctcgctcaggcgccctccccttcatcccacggactatctcgcccccctttctccttcgcctccagataccaaacctcctgcgacgacccttatgacccttcctcccgctttcaatcctgttgcgcgcccccgaccttcctttgccatattgctcgctctgatccgccacctttatgctccactcgcttcgttccttcccgctctcgagacgtcgtgatcccttgacgagtgaaagggccccaaatggaaaagcccagggcggggacttcgccgacgaacgaaccgcctcgcgtcgacgaccgctgcagcctactcctgcacctcatcctctcgacgagcgcacctcgcgacccccttccatcacagcgaccgtcgcctctcctcccactcgacaagtgcgccgcatgtccgtgtccgcttcgacgtccaagccggcggctcagcagccaaagcggtcggcgatccaggaggcgacgcacacctcgcaggactggcagacggcgtacgtccctgctcccctctcaatgcgccgcttggcctgccccttcttggtcacagccggcgctgacgcgtccctggtctacccttgatccttcgtccctgtcagctatgtctgggcgttcatcagcaagtttcacggcaacatcgtcggcaagggcggcctgacctcggtcatggagtgcgtcgctcgtccttgctctcgtcactccctcgaggcgtcagcagcagtcgcagagctcgtagacgtcgtcccttggagggctgtagcggttccgctctcgtaaatctaggcagtcagcgtgggcgacgagagtcgaagggggcagagcgcgagacggtcgagatgctcgcgtcgcgcgacgcgtcgttcgcgcgctcaccctccggctgaggctgaatgggtgccccgtggcggccttccttacaagagcgagataccgtcacgagcggtccatccggatattctgtccgagacctgaccggcgcccagacggggtggctgcccaagggcgaggtggcctcgagcctgctcacgagtgaggcagacgacgttcccgcagccggtcgcccggccgactgtcctctcgcgcgcttgctcactgggcgagctcgctcgcggcgacagtgaactccctcaggaggcaggagctgctgcccgcatgcaatcctgagagggtggattcccgcctcgaacgggctggaagggagggaccgcgttcttgacggttcgtgctcgacggtcaacgcttgcggctgacactcgctccttccttgctggtcagcctcgagattgccctgatggcttcgggcgaggacgacgttctgtcgtacgtcttccaaaagatggtcgccgcccttcgagacggcgcgatccgcgacatgaagtgcgtgcctcctttcgaggtgcttctcgaacgacgtgtccgtgctgacatgtcctgtacctgactccgtcttcaaaggaaggagacgatgccgcgctttctgctccgaggttcgtctgctcgaagcgactgccgttgatcgcttcatggacgctgacaagaagcctctgtcgcttgaaccagtcatcgaccagttcctgcccctctccccgtggtccacctaccacgacattcctcggcatccgagctcagagtacaccaaggtctcgacgatgacgccctcggacgctcaggcctaccatctcggcctcaacccgctgcgggcgttgatgagcgacgacgcccttgaggagggcggcggcgagcggccacgcgagggccagaagggctgggacgacgaggctgggcgcatgctctggcgcatggactggaaggagaaggtctgtcgccttgcgctgctgtctcctgcccgcgtaggctgtgctgacttcgccctctgctccctttccgattcttcagctgcgactgctacggcagctcgtcgactggcagctcgttcacacggctgccatccggcagacgattgtcgagtgctacaacatcgcccaccagaagccgatgaacttcagcaagctcacgaatcggctcattgtcgagccgattgcccaggaccggacaaagaagcgcttctggtcgctcgacggtgcgtcacgagtgcgcggggacggccacagagactctcgacagaccactgattgtccctacctattcagactcggcccgcatgtacacgtcgagcaatccgttcaagaaggtctgcccgattacgccgatctcgtcgtccaaggacgagctcctggcattgacggcggaattgcgcgaggccaacgactactacccgccgccgccagtcgaaggctcggccgaggccccggtcgaccttgtcgagtcagctggcaagaagaaggtcaaggccgagaaaaaggacaagaactcaaagcagcacgacggcgaggtcaagatcatccgcttcatcgaggaagagcacctgccccgggtagagaaggagatcatcgttagtcctctctgtcgagccggtcgtcgcttctgctgtcggattgacagaacctgcggctctagcggcaagaggcggcacgcaaaaaggcgaccaaggttgccctcctccaggctcaggccgacaactttgcgacgcggacgacgcggacgcgcaaagctgtagactacaaggcgctcgacaagtgcgtgcccgcgttggctcttgctctgctctcaaagggctcggctgatctgctgctgaaacctcctccttgcagcggcacggcttatggcggtggcagcttctccgacgacgaccggacgaacggcgactcggacgatggctactcacaagccgagtcggcaggctccggccggcggcgctcgggccgagcgtcggccgtctcgtcccgggcgacgggctcacgccggtcgacgcgcgtccagatgcgggacgaggaggacgacatgttggcggctctcgagcagagcgcgcgcgaagcagagatggatcgggcgatgcgcggagtgtctgcgtctgcctctggcgacgacgacaacgaggacggcatcgaggacgacgaggagatcattggagcgctcaagccgaagatggcgatcgtcatcgagagcgacgacgaggacgacgacgacaacgacggtggtccggcaccgatggcggtcgatggcccggccaagacaaacggaagcttgacggcagaccggccagcagcggcagcagcggcctcgacgccgggcaacccgtccaatggaatcgcgacagcagaggcgggtgcgatggacgtcgaccaggctgcgccctgagtgctgctcacactttcgcccgatctcagccgatccatgctcgtgccgtacttttacttctatgccggctgccggcaaagcaagagtttcctgaagtcgaagattctagacagccggcgaggtgctctacttgagttcgatgcgtaagggctcgccgcggacgcctcgcgcgacattttcggcgcagatcatcgccatctcctcgcgcgtctccgacgtagccgacccgatatgcggaaggacgacgcaccgcgggtggcggacgagtgggtggtcggcagggatgtgcggctcgccggcaatgacgtcgagtgcggcgccgagaatctggcccttgtccagcgcccgatagagggcttcattgtcgaccacagtcccctgcagaagcgcttgcgcaagtcagaacagagtgtgctgcaaagcaggaggaaagagcacgcaagacggacccttgcgcagttgacgaggacggccgtcttctccatccggccgagaaagtcgtcactgaccaggttgagcgttgccgacccgcccgagcagaggacgatcactatgtcgcttttcgctgccaaagcttcgatcggcaccttttcgaccggcaggcggagacgggaggacaactctgcgtcggcatcggagcgatcacgtcctgagttggagtagatgatcttggccgcgccaaatggagccagtcggagcgcggtcgcctcagagatgcggcctgcaagtcagggaggttttagtcccagcctgagatcggccagcgctggtgtggcagacgtacccattccaagaaagccgattgtcttgccgccaatttgcgaaccacaaagaagaaaactagaaagagcacggctcgtcagatcgatgacccgagttgcgtcgtcgaacgaaaaggaacaggagttgccaactgctgcaagtactaacgggccccaaccgagcgacccccacttgccggactcgacgagcgagacagactccttgacccgccgcatggccatctgaccaagctcagcagtggtcggtcatcagtctaggaaggggcatcttcagaggtgagactgaccagcgtgagagtgcaagtcaagtcggcgactgtcgagaggtagagaaggccagtccaagctaagccttgtcagctctctcctcgtcgcttgctcgtcacggtagagccatgttgagggacataccagcatccgtgagcacgtctggcgtgtaaccgagcttgatgcctcgtgctcggacggctgcgagcgagatgtggtcatagccgacgctcctggtgagcagaaaggggtcagggatggctaacaggcgagggagctgacccgactcacatcgtcgacacgaccttaaggtccgctcccgctaagaggttcctccgtccggtcgtcagcaaattcctctgcgaaggagattctcggcatcggccttaccgcggtccagtagctcctcatcaatctggtcgaggagcagagtcggccgtcggtcagcgttcagcgcctcggctccgatctcaagacggtcaatgactgaccttgtcactcagcatcactgcgagaccaacagcgcccacgcaatgctccagaagccactctcttgaacaggccgaatcgtgaggccaggcgacgacctatgcgaaccgatggaggagccggtctggatcagccgggttagtcgacgagctgctcgaccgcacaacacgcacttctgtgtcagcgccgagtgcttcagcgacgacagcgttggcggcagagccgagagagcgagtgacgacaatcttgcccggcatggtgtttgagagctcagcacacggttgctcgtcgagagatgtggtcggagggcgccggagctcggagggaccgggcgggccgatgtgaggccgggcaccgccgcgcaggaaagcagcgtcctcagcacagcggccttcgtccgtcacctgagcaatatttcaaggagccagcacaggcgatgttcgccgtccaggcaggtacctaggagtcggatcggcggtgcaaagcagattgcatgtcgtcgacgacgcatgttgacgcttcttgctgcgcagacgactgcccgcggcaggtcgtatgctctcagccctacaaaggtcctgcaagcgttgctcagggagcagtccagaaagctagtccgactgttcctcgaatgcgcttctcgaccaccaattgttacggtgcggctggtcgttcgaagccagcgaagccttgggcttcggagcacgcagcgcgcgcgtctcgcgctggctctgtcgtcctcctccgggcggccgagagagctctccaacaaccatcagctttcgccctcccctcctcctctccctctcttcagcttctttctcttgctatggctgctgttgtcagtgccggatgctcttcgagcgcgttgctgtcaggcccgaggactgacgctcagccacccgttcactcgcagctcccttccggcgcccgccccggcggcatcctccctcccggcgccgggcccatgccatccggccccgagctgcaggcacagcaggaggctcagcgacaggcgatccaggtgcagcttgagcagcagcgaatgatgaacctcgaaaaggcggcgcagatgggcgcgctggatgaggtacgtcgctggccgtgccccggctcgaccgcgagatggaagccgccctcggcgcgaaggccgccagctcactgctcctcatacccctctcctctgcgactcgtcggcacgatcagccgcacaacccgatctcggtcaaggtcgacgccgaggagcacctgctgctgtcgacctcaggctcagcatcatcaccgttccccttgccgccgacggtcgcgccttcgacgctcggcctcccgctctcggacccgcacgtctttgctggctctccactgatgcccgtccagctcgacgacctgctcgtcaaggtcaacgcgcttgctcagctcttcaagcgtgccccggacggtgcgatcccgccgccaccgcaggcgctcgatcgccaacggcaggcccaagtggtcaagttcaaggaggagggcaacgtcagttttatagcagcccgctgcgccttgcaaacccgctcacccgcaaccatcttgctctccttccagaacttgttcaaggccaagcagtaccagggctcggttcagttctactcgctcgcgctcaaggtcgcggtcgagcgcatgccgtgggaggcggcaggcttccagcgtgaggagctcagcgtcatcctctgtaaccgggcggcggcttacggcgctatcggagaggttcgtcctttgactgtccgaatgctgcctgcaccggctaacgagcttgctgtgcacgcttgcgtccgaccgcagtgggagcgcagcctgcttgattcgaaggcggtcatcgcctacaagcggccgtggagcaagggccacttccgtgccgccaagtctatccttccaaccattggaaacgtctcgtcttcgtgagcagaaagctgacccttctcgcgtcctctgcagggcgcttatcgagctcggacggctgtacgaggcgcaagaggcgcttttgctcggcctctcgttcgagcccgacaatgtcgagctgaacgctttccgggccgagatcgaggccaagatcgccgcggctgaggacgccgagtgggcccagctgcggggcgagaagccggccgatcctgccattgcccctagcccggacgatggcgaggccgtggctgtcaattagatggtcgtgatagcgctggaccgtcgtctgggtagacagccataatcagcgaaagaccaacgtgcctccatgcctgccatttcgagcgctggaaagagatcgtggccgcaacatgtgcaggccgcctttcgacgacgctgtgaaacggcggctccgtccgccgcgcctgggtccgggttaaccgaggcgggctcgctgccacgcctccgtccatcacgtcgcccttgggctccttaccccaatatcttgtccttcagctcccgcttcgtcgtcatgccgcccaacggccgctccgacatcatctttgacgaggacgaggatctcgggctcgctggcgcgtccgacaggccattttccgacggcggcagcctcaccgagcccttgtacgagcccctcccgagctcggtcaactgcactcggaagaccacgctgacaaggccactcgacgtctgaccttcaggacgtcaggctcgcattatcgcttgtcaaaacccgaggtcgtgcgcggcttcgccaagtaggttgcgctcgatggtcgtcttggccgaggccagtagccggtgctgacctcgatcttcgcgctctctcgcctgacccagccggatcgtccactccgtgcgtctggctcgacagcttggccagaagaaggtagcagatgctgacgtcttgagccttgtcgtcttgctgcagcgggcgtacatcatcctctacctcgcgatggccgtcctctccctgacgacggttgtcctctcgctgctgggcgactgcccgccgacgtccttctacgtcctcgaggtcattgtcaacaccgtcatgattgccgaggtcggcatccgcatgatcgcctacggcagcgtgcgtccctcgaggcgatgtccgttgagagccagagcgggctttgctgacctcgcgctgctgccccttccgtcgctacagtcgttcttcaccacggtcgccaacctgctggatctcctcgtcacgaccttctgcatcatcaccctcatcgtcgtcttttcgcggccatgcagtcgcggcgaggaggtcctcgacagcgccgtgctcgtcgtccgcaacctgcttcagttcagccggctcgcgacactgctgcgcaggtcagtttgatccctcgcctggccctgccgaaccgcgctgatctcccatcgcgctgtcgcttcagtacggggtcatccatcttctcgcgcccgccgccaatcgacctctcgcaggcacgcgaggcggcgcttcagatggacctcgacctcgaggacgacgaggccgtcgcagcgcatcacttgtcggcgtcgtcgacgctacagagctccggcggtcggggctacgagcgcctgcgcgccgaggaggagcagcaagccgaggaaccgctgagacggggcgtcgggccggtcggcggcgaccgagggaaggagaacctgaccgacgaggacgaggaacagtgggatcggatggtctgaggttccgagccggacggtgtcgtttggagcctccgtcgccagagaagtctggctgcaacagcgtctgtcgacggttttctctcactccttggcaacggcagcctctccacccgcaccgtcaactgttgagctgctgttgctatcatcgagcatctcgatcagcgcgcccttcttgcgcttcggtgccgtcgcctggccaatcttgagagcggccgggacgccgtcgtcttcatctgcggacgattcttcagaggactcgctgtctgagtcggacgagtcctcgtctgacgaagacgtcgcgtctccttcctccttcatccgcgcattgaagacgcccaggccgaggtcctgcaacatagcgagcgcgttagatgttcggacgactgatcgaaccgccgaacgagcgcaccatctcgacgtattgctcctgttcctcgccgacgttctcaatgtcgaggtcggccgtcggctggttggccagctgctcgttcgcagccgccatctggggcaagaaagcctgcaagcgcgacaggactgcggcggcagaggaacgggtgcccagagtcagctggtccgacgcctctctggcagcggacgtgacgaaagacgcacgctctgagggcgggccgacatgaaacgtcctcggcggggctgggaacgctggaccagcaggcttgtcttgggtcgcaagtagccgagctgaaggcaagtaaacgcgtcgttcgactgcaggcgtcagcggccagacctcaagcctcctccaacgcagctgtgcgacgtaccaagccggtcctggcgctcgtcttgggtctctacgtcgagccgagcgtttgaagacatcgtgtcgaagggatagggctgtcgcggaagagagtcgccgtcttgagccagctgcgggtcgttcgtcgtccttgcaacgactttgagcggcccggcgacggcgccagctcgactccgaccgccagcagcagcagcagcagcagcctgccttcccgtcaccgacctcgctcctacatctagcagcgcatcctctacaaatgtcggcccacgtccttagatcgtcacgcctcctcgccggccagggtccgtcggcggtcgcgggctcatcgtcgtcgtcggctgtcctcgtcagggccttttccgcctcgcccgcatcactcctgccgcccaagaaggcgacgccagtcaggccgggtgagttcacgatcaagggagcgttaggcgatcaccaagctgatgacgggcattctggatgacagcggtcaagaagaagcagacggccgccaagcagtcgaaccgggcgttcgtcaagacgaagcggagcggtggctggggcaacttcgtgcgtgcgagcgagcccgctgccgcctgccggcttgtagaggcatgggctgacaccggacaacgacgttcctcatcggcagtcgtttgacaagtcggcgattgagcagctcgacccgaggccagacgagtttgctcacctgcccaagttcacgcctgtgcgtccctctgtgagctgcctcggggcgcgttcggccagctcggtcctgacctcaagctgctctcacctttactgtcgcaaggccgagctcacagccgagaacgtcggagagaagcttgcttttgacgagaagctcgttgccgacatcagagcctggggttaccccccgggccaggaggtgcgcgtgaaccgtctcgggctgggccgccgcgctcgacctgacctctctgcgcctcgctctacagaacgtgcccttcacgatccctcgtgacctcacgctggaatttgctcgtcgactggaggacggcaaggagttgccgtcagagaagtcgacgtggctgctcagtgcgtctccctcgcccgaccattcgcccgtggctcccaacgctgaacgaccgcttgctcttgactcgcaggcggtggatcgggcggcggcaaaacgcagctgatgcttcagacggtcgcctacgcgttgcagagcgactacgtcgtcatgtacatgcctcgaggtgcgttcaacagagtttcttgccctattctcgtccggtcgtcaagcgtcctaacccacaatgcacccgcgcagcctttcagcacacccactcgcggtcagcctaccactacaacgccgagacacaggtatttcaccagccttacctgtcgagcgagctgctcggtcgtctcgttgggatcgagtcgaaccgaaggctgctcgccaaggtcgcgctcgctaaggactacagctacaagcccgacctgccggcgggcaccggcggccgaatgagcacgcccatcacgattgagactgtcgggcagaagggcaagcagaacacgctcgccgacctggctgcgctcggcgccgccaaccaggacattggtgtagccgtctttgaggatgtgctcgacatccttgcgcggcagtcgacgtgcgttatctttgcccgccgtcactcgagatgcccagctgataatttgaacgcatcagcgtccccttcttcctcgcgctcgatgtcgcccaggcctactttacgcagtcagactacctgacgccagagggccaccggctcgagccgtaccacctttccgtcccgcgcaccctgctcgagtacatctcgggccgcaagccatttgtgagcaaaagtggcgacgatgagctcatctgccgtttcgtcctgacagtctgatctcttttgcagactcggggcgccatcatgctcgccctctcgccctcgcacacaaccccggccatcagcccgtccttccaggccggtctcggtctcagtcggcagccgctgtcgatcacgggcggcagcgacgcgccttactcgccgcgcttctaccccttgtcgcccgagtcgcagctcaagacgtggcacgtcgagaatgccaaggcgctcgagattgttgaggtgcccgaaggcatgacgatgactgaggcccgcggcctctggaactttggcaagacgcagcgcatcggtgagcagacgcgacgtccagagggcccaggtcgcctttttcggactgctgacgtcgcccttcccctcgtgtagtcaactccgacgagaactttgtcgcgaagtacgtcgagagcggcggcaacccgcgcgaattttggcggagcgtgaagtacacgacgctttgaggcagagcagatagaggggggccgcaagggggtctttttatggtatcaattctccctcatgacaagaagaaggaggcggaagagccgtgtgtcggtgtcgttggttatagggcgtgcggatgggcaggtgcgaggtgggaagagaggcgtccgagagaagagagaaagcgggcgtgcgaatatagatctcttgcaggagactgcggcctgcaccaggcggcaggcctcggatgagagaggatgagtctaaagcaagcaaacagagcatgtggccgcgtctacaggcgggtccgggagtgcgaagggaagtctactgccgttcatgggcaaggcgcgcgtcgatcgtcgggcctgcgacgccggacggaggcgactgcgagcggatgtaccttgaggccccaggcaagagacgctgtcagcatttgaaggttaccgacaaggagcgggtgaggcaaaactcaccgctggagttcggcgtggtccaagtcgtcgtcgtcatcgaccgggaggctgccacggcggcaagcgctcgagccggcacgcggctcgtcgccgtcgtattcctgactgtcgagcaggtgctggacccgctgccgcagctcggcgttctctgaccggacggcggccaggtctgtcttgagtcgccggacgtcaggagccgcctgctgcagacgcaggagctccttctcgaggtcggtcacgcgggcatgcgactcgtcgagctcctgcgtgtatgcgtccttgagcttggcgacctcggcccgcaggtcggccgactcggccgtcagggcctggttgtcctgcgagatcttgttgagctgataaagctgccgctgcgagtcgacgagctgcttgcggagcgactcgggcgactcgtcgattgtcggcgtgttgcggccggtgacctcgcgcgtgcgggaaccagcctcggagctattggtaccgcggatcgcgtcgagctcgccctggagcgacgacgtctgagccttgatcttgacgttctcgtccttgtaccgccggaggagcttgtcggtcgtcctgataggcagggaggcagagccccgattagcaggtgccgattggccaagcgcagaggaggaactaaaactcacttgacgtactggaccgccgtctggtagtcgctctcgatctaagagtgtggcagcgagagggtcagcagcgtcgctctcgtcgaaagcgtaaacgaaaagcatttgaaacacacctgggtcttgctcgcgagcgtgtctttgagctgcttctcggcgatttcggcccttgactcgagctggcgcaggctgtcaggagtcggcgaaaggacgccatcttgattgacccgggatttgagcgcctcgagctggccgttcagatcggcaaccttggcctcggccatctcgatccgtcgctgcgacaggtcgagctcgcgctcagtctcttcgtgctgctgggccttctccgagagcttcgactcgacgtctcgaaggcggtgcgacgggacactctcctcggagtggaggtcgtcctcattgacggcgatgccgctgtcggcgagcaggccgcgcatcatggccaggcggacctcgagctccgagaccgccgactgcgcatccttgacctcggcctcgcgggtggcgagctgctcgcgcaggcggccggtgtcggccaaggcgaccgagagcgacgaccgtgcaacctggacctcggaccgaaaggcgccgtgctcctgctcgatctgccgagcccgccgacgctgctcgccgagcgcagcctgcgactcgtcgatgcggatgccagcctcgcgcagcatcttgcgcagcgacgacgcttcctggtccatcgcctgcaccttgtcctcgtgaccgcggatcgagttgacgtgatcggccttgaactgggagtggtgggcgagaagggctgctagacccccggtcgttgtcaaccggagcgagtcggcctcttcccgcgaccgagaccaagagctctcgacgtcggccagacgagccgtcgcggcgtcggcctcgcgcgaccgcgtgtcgagctcgcggcgcaggttttcgacctcaccctcgagctcatctgcccgactgcgctcgctctggtagagggattcggcttcggtggcccggccacccgaatgttggagggcaatctggagctcagcgagaacccggacgtggccgtcgcgggaggtgaggacctcgtcgtgcatggaccgcgtcgccgtcaggtcgacgaggtgctgctgaatcgtcgactcgtgcgccagcatacggtccgcgtggtcgcggagggccgactccgcctgagcatgcttctcgtgcaagtcgtggagctcgtccgtcgtctgggcgtgatccctttcgacgcttgtcgcccgccggacagcctcgccttcgcgttcctctgcggccagccgcagttgcttctcgaggtcgaccgtctctttgagctgggcgagctgccgctgaagactctcgtgctccgagccgactaagccaaggcttctctcgagctccgccgatcgatcgcgctcgagccgggcaaagtcggcaggagcgttggcttcgagtgccaacatcttggcgcggtagaaagctgcctcctggatggccgcctgctgcgtccgctcagcctcgaggaagcgctgcgacgcccgctggtcctgcgcggtgagctcggtctagcagaacagttgcagaggtcatcagtcaagggcgctttggaggcttattacgagcacaggacaagacctacctgcaggcgagcgcgctccttcttcaggccaatcagggcgtcggcgagcttccgcgcgtcggattcctcggagccaaagtcctcgagcgcgagcgtcggctcgttagagatgctctggacggcaaagccggccttggccgcccgggcgagctcggctttgagccagcgctcgcgtcgcttcatgccgtcaatctcgacctcgcgcgccttcatctcgcgcatgaggtcggccccggcaatgccgctgagactgccctggcggccgtgcccgctgaccgagttcatggcgctcgcaatcgtcgggctccgcggctgatagaaggcgtcggccggaggcatgaaggaggacgaggccgaagattggagcgcagggtcggtcgcgctcggtgacgagctccggacatcgccatctcgcagctggctcggcatgtgctgcgacttggccatctgaccattgctgatcgaggtcggcgagaagcccgggctaagggtcccagcaggcgagtcgcggccgaccgacagctcggggccgagcggaacgccattcggcaagccgtggcgcgaaaagtcgcgttgcgtcgggctgttggtggcggatgtcgtccgcgctggccgctgaacctcgatcggggacctggacgacgtggcgtcgccaagctgaccgcttgcggccggagactttgcccggttcgggtcgccgacgccgtaaatctcgtcgccctcccggcgaggccgcatcggcggcaggccagacgacttggactgggcgcggtccgtaccggtcggagagagcgcgcggagcggctcgggcggcgacatcggtgccctgttcgcctgcgactgaccctgcgcagaggctgcgcgagggggagcaggcgtcatctgctgctggttcgggttgagcacaggcgcggaggacttgcgatggacagggttctggccaggcggccgagacgggtccttgggatacttgatcttggctgcagcacggaccgagcgcgagcgaaaagatcagcctcgggcgggcttgcggctgctcgatcgcgcacaagctcaaacgcaccggtgtcgagaacgtggatcaaggtcgggttgtcgggcgtgccgtcgatagcctcgccgccaaggacaagcaccttgtcagcatagctcgccatcgcgtgcccgctccgggcgccgggcgcaggacccatgttctggaacatgaaccagcgcttagctggaaaaagtaggagagagatggtcagtctctggtttttgcgcgcaacggcggcgccggacgggcgacggactggagatcttgaaggcggcgaggtcgccgaggtcctggccgttgacgtcgcggccgccaaagatgtagacgacgtcgccgacgacggtcgccgcgtggccctcgcgggcgaccggcaggtagccgatgcactcgagctcggtccactcgcgcgtcggaatgtggtacgaccaggtgtcgttgtagtggaactcgccgtccgttccgccaaacaggaggattcggtcctggaacgtcacgcagacgtggccggtccgcgcccggggcgggtcgttgaccggcgtgatgcgatcccagcgagggccctcctgcgtcttgactggagccgaggggcgatcgagcgatcagtcggctgacagctcaggtcagagggcgccgcagaggacgacgtactcgagttgaggtcaaagcaccagaggtcgtcaaagaagaccatgtcgacctgaccgccaaagacaaagaagcggttccgatgcatgcagacggcatggccgtaccgaccggcgggcatctggtccggctcggtcacgatgcgcgaccactcaaagttggctgagggacgacacatgtagtgtcagcgatgagcgtctggaaaacatgcagagcagccggcacgcacccgtgttgagcagatagaggccctgatcctgctcctcgtcagcccgcgtcttggtgtcgccgccccagctgatgaggacgtttccgaccatgccggtcgcgtgcccgacccgagggaccggtacctcgccgcggcccatgacgggcacgagtgcgagcgtcttgcagtcgagcatgaaaaggtcgttgcggaccgagtcggaaacgaggccgccaaagaggaagagcgagccgccggccgtcgcgtttggcggcgtcgacaggccgtagcgcgggaacggcgtcaggtgcggcgtcggtgtcggcccgcccggtggaggcgtatgcggcagagtcagtcggcgctgcgtcctgtggaaggcgaaatgtcggcgtcagtggggttgtctcgagttgcgagcagaggctcggtgcaagccggctcggggcgcaccaaggaaactgaatctcgctcggagccggcggtggcggtcctggcattaatgacacgggcttccggatctggtggacgccgcccgacatgggcggctgctggctgccgctgaccttgcgctgctcctgcgcggcctgctgatgggagagctgctccctgcccatctcgcgctcgccggccccgaagccacccggaccgcccatctgctgcgacgggctatcccgaccgcccgggttttgaggaggcaggccgccgttcgggttcggcatgcggtcgaatgaggttgcgcgaggcatgctgccgccgttcggcgccggctgttgaccaaagttcatgggcgggttggccggctgctgctgctgctgctgctgctgggcatcctggagcttggccgccttgtcattgtgcttgtctttgttacgtttcgagaagaacgacatcgccgttgcaagggcagctcgctaggcgagtttggggaaagggtcgccgaaggtgaggtcgagcgagaggaggcgcgtcgggaagtgggtcggccgaaggcggagggcgcagaggcaggcggcgagtgcggtctcgtgctcgtgagagagaacggagcgatctgttgaaccggagggctgacaggaaacgaggagaagagaggccttatcgggccgtctgcgaggaggagcagatgtcggcgtagcgagagagagacgcgagggacgagagctcgaagcaagcaagcaagcagcagggcgaggcgtcgcgccggcgcgggcgcgcgcgcgcacgcaaaaggttggccggcgcagtcgcctcgctgggcaggcctgatggctgccctgccctgccctgctgcttcgacccgctcgtcgtcgacgcccctcttgctcctctctctccagctcacaccacgctttcacgcacgcacgccggcgaccctccgtctcggaccgtcctcttgcccgtctcgcttgccgcgtcagctctccttcccttgcgtcgccctcgcccgcgccatgtcgttcggcagcaactcgtcgccgccgccagaccccgagctcgtcgagccgccggcagactcgatctcgagcgttcgcttcagcccaaacgcacccatcctggccgttggctcgtggaacaacgaggttcgtcctcgccctgagctcgtccactgaggggaacgggctctgaggcttggtttggtgcgcggccttccctccctgtccaggttcggctctacgaggttaacgcgcagggccagagccaggccaaggccctgcacaagcacgagggcccggtactagacatctgctggacgactgtacgtcccgttaaattctgatcagcttatggctggagttgagccggctctgctgcacaggatggagccgcctgcatctccgccggcgcggacaaagccgctcgagccttcgacctcgtctcgggacagtcgcgtacgtccgctcgaaggcttctgttgctgcttgcacgctaacagcctcgcctctctgtaatccctggtgtctctaggacaggtcgctgggcacgacatgccgatccggtcggcgcgctactctgaggcgtcgtccggctcggcctacctcatgaccggcggctgggataagcagctccggtactgggacctccgcacgcgtgcgcccacatttcaacctttcacctctgcttgagagacaggaggactgataacaaccctctcaaccctgcagagggcatggttggggccgtacagctgcctgagcggtgctacacgatggacgccaagggcgatctcctcgtcgtcggtacggccgagcgccacgtccagatctacgaccgtgagtagttgagctttccgtattgctcgtcgagcggtcttctgctaattgtagtcggccttgaccttcgcccgccagttcgcaaccccggcacgcccgtcaagacggtcgagagtccgctgaagtggcagacgcgcgtcatctcgtgcttcccgtcgacgatcaagcccggctacgcgcttggctcgatcgagggtcgcatcgcctacaacgtcatcccggagcagtttgccagcgagacgtttagtttccgctgccaccggagggaggcgcccgggccaaagacgaacccgccaaagccggtcaccatctttggtacgtcttcctgctgagcgcactcttgtgcttgagtagcagctgacgcttcccgtccttccagccgtcaacgcgatcagcttccacaagggctacgagacgtttgtcacaggcggcagcgacggcgggctctcgttctgggacgcccaggctcgcgctcggctcaagagtcagtccctttgagcgtgccgcgcgatccgagcgcgcaacggctgaccgcacgcacacccgccgcagccatcaacacgcagcccaacctcagcgcgacgcaggtgccgacgccgatcgtcgcggccgacttcaaccacgactgcactgtcctcgcttgggctcagtcgtacgactggtcgcgcggccacgccggcttcacgcccgacatgctcaatcgcgtcggcctgcacgtcgtcaaggacgacgaggtcaagcgcaaggggaagtgagaccggcccaaagcggcgctagtcgcagcgcacagagaagaggagacgactggcttctgcaccctccaaaactcatcacgagacgacattaatgattcatgaccacctctcgcactgcctgtcgttcggcctgcgagccgtcgctaaaggctgaactgcagctagggcgcgactcgccgcgacgctcggcagctaggccgggcaaggcgtcgtgatctgcgagcgcggtgcgtcgtcgcgccatggcgctgttctcggttggccgcgaggccgggccctgtagaaagcgacccggagggcaggtgaggcggtcagggaaggagccgtctgcgatgtaaaggcaggattacattagtcggtcggcagccggttgcgcctggcccaaggccacagacacgacgaacctcttcagctcagcttgctgctctggaccgtgtagtagacgccgccagccgtcttccgtgcgtctttgagaagctcccggccgtgcgcctcgacgcccgtctcagcaacgtccgccgccgcttcgtcgacgagctcgaactcgcgctcgccgtcaaagacgatgactttcttgccccagccgaggctgtcggcattgccggttattgcctcgccctggtcgagcagctcgcgcacgcgctcgctccggattccgtcgacgacgctgatcaggccctgaaggctcgccgccgtcaccgaggatgggtagggcaggctcgcgagccggtgcagcttgcggagcgtcggctccggcaacggtgccgccggcgtgataagcgactcgagcgagtagggcggcttgagcgggatacagtcgtccgtcgtcggcacgcccgggcagagtggatcgaaggacggccggacgctgctggaggcgaccgtcccgccggccgtcgtcgactgctctcgagcgaggcggagaggtcggaggagtgcggccgagcggctcggcctcacgctccggcaggcgttgacgagaaagctcatgcgtgcgtgtcccacaggctgctcctggtcgtcgccgagcgcgatgggagtgcagagattggacggaggtgcaaaaggtcaggagggtgctttcggtcgccgctgacgctcgtcggtcgtcggacaagagcggaggcgcaccatgcgtccccctcctcggcagagacctcgcctgaaatctcgacgacgagaactgccagcaggggtctctctctctctcctcgctaacgaccacgagctgacgagaatgctgctccagacatctctcctctcggtcctggcctttggccttcctgcgcttgcactcaccgaatctctcggctcccggcacccggccaagtcgtcgctgcggccgctgccctcgctgcgagagcaggatcggctcgagcgtcgctgggtcgcccagaccgagacgtttgtggccgaggccctcaagaagtacgacatcgacgcctacatcatcgaccagaaggagtacgccgaggacacgacgttccggagcctgacgagcagcgcgagcgtcttctcggcccgtcgccggacgctctggctcttccacacctctcccgccctgccttcgccgctcaagtgggttgacaacacagcggccctctgggtcgcgctcaacgagtcgctcacgacgattaaccctcgtcagattgccataaacgtcgacgaggccgttgccttctcggacggcctgcacaccggcgagggccaggccctgcgcgctggcctcggcgagcactgggcgtcaaagctcatgagcgagcgcatgctcggcgtcgaggtcgtctcgcggcgtagcggtggcgaggaacagctcaagtactaccggatgatgcaggtgcgccgagaccaactgccgtgcgcaactcgctcccggcagactgaccgagcctctctcctctgctgtgccaggagtcaatctgggccatgatcgaggagactttttccaataagacgatcgcgcccgggacgacgacgacgacggtcagttgcatcgcggaggtgtgcagtggcctgtcggactgacattctgtctcgaccgcccacccacgtcaggacctcgaatggcactttcgcgagctgatgcagaacgtgagcagcctttcaagtcgctgctgtcgccacccttactgacgggctatcgactcgcgacagctcaactgcacgacatggttccagccctcggtctcgcttttccgagcgtcgacgaaggacgacccgtccttcccgggcgaggccgacaactcgggcgtcatcgaagagggtgacatgctccacgtcgacgtcggcatctacgcgctcggcatggcgaccgacacgcaacacctggcctacgtccttcgtgcgaacgagacgtcggcacccaagggcctcgtcgagggtctcgcgaaggccaacaagctccaggatctgacggtcagcaaattgtcgacggccaagacgggcaacgaggtcttgctcgaagtccggactgaaatggccaagctcggtcttggtggactcgtttattcgcacccgattggcagctatggccacgcggccggctctccagtcggtatgacgaacatgcaggacggtcagtcgctttctcgcgctctccgtctgacccaggccttgctgacttgaaggtggccacgcgcgacgccaggcgtcccgatcagcggcaacttgcctatcctcgaccactcttggtactcgatcgagctcagcgccgagtcgaccgtccccgagttcaacaacaagacgatcaacttcatgcaagaagaggacgtctactggtcggctgagaagggcggctgggactgggtctggggccgccaggagcgctttcacctggtctggcccaaggcgacgaccaaggccgccgacactccgtccgacgacccgtcactcgtcatccaggccaccggccgctttgaccgctggtactaaggggatcgtcgcaccgctcgctggtcgcgacaggtcctcgacggccgcacctgttgctctcgttgctcatattctttgtcccgcctcccgcctctgcctcttgcctcttctctcgatgacgattcctctctgccgtgcctggttccgaaattatggcccgtgactggccgcgagacttgtcgtcaagaagtggcgcgcgagtcgccgttgccgacgccgccgcgaccccgacgtgactttcgccggcggccgcagccgctccagcttctggcctttgctttcggagcgacctacgacgcccatcagtccttcccccttcgcggctgctgtgatcttctccgtattcctgtccctagacaggtcgttgcatcgcctcgactcaggtccggtcgcccttgttcggtcgctcgataactgcctgcctgccccgacacgtgctgacgtacgcgtccccccttcacggctccaccctctcgcagagccatgtccagatcgcctcctcagcttgatcccctgcggtcgacctcggcgacaacgtccgggagcccttctccgccgtctggccgcaccttgccgtcgccagatccgcctcgagccaacggtgccttcatcgtcaagcggccggcccactacagcccgtcacctccgaacgaggccctgctagcggcgccgtcgacgacggcgtcaacgccgggcacgttgtcgggcccaccctctgcgccgctcgagcggctcgagatcccatctacggcgtcgtcaaagccgcccggtcggcgcgtccagtggccggtcgacctcaagagccccgtcggcggccaggcgttgagtccgccgatccctttgcagacgctcgacgacaccggcgccaaagaggcgttgcggactgcgctcgacgcactcgagctgcatgacggcggcctcccgcgaccgtcctttgcccacagcgcctacgacgtcgagtcgcaggtgacgagtgagggcacgacccgggcgccgagcgaggccggctccgaagccgacatggaggacgtccgcgaccagatggacatctacgtcgatccaaacgagacggacggcatgccgtcgctacacccggagaaggacgccaagcgcaaccaggatgccgcagtcgccctcgtcagggcacacacaagcggcttctttggcgtcctgcgcaagcgccgcggccacagcgggaccaacaagcagcaggcggcggcgtcagcggcggtcatggctgctacgccgacgagagaggagcccgacgacggcactggcgcctttggccggcggcttcgcgacggcggccgcttcgagaccaactatgacgagatgcccgagccgccgcgacaaaagtccaagaatacgggcggcgtgctcgcctccctgctcgccctccaaaatggctcagactcggcgagcatccggtccgtggcgacctcgtcggcagggtcggcctcacggccaagcagccagtacggctcggacgaagacgacgaggacgatgagcgagagcgactcaagttcattcacgagtaccgggtcaagaatgcctggctcaagacgcctggcagctcgacgcctgggacgaaggcccatcagcgcaatatctcggccatctcgccagacgagattcgtgagccggctccaaaccggcactcggcctcagtcaacaacttcatctccaatcggacgacgaccctcacgcctgtctcaccaggttcgcccggctcgccgccgacgactgccgactctgccaccttcctgcgcgcgccgaaaaagagtgcagcctcgaccgtcagctccggcttcaagaagctgggcggctcgcttggtctcgaggtcgaccatcggccgtcgtccgcaaagagctctgccggcgtcttcggtggcctgatgatggcgacggtgagtctcagtgcgagccaattctttagtaaagcggggactgatttgccccccatctggccccctctttcgacccgcagagcaacatcacgggtgccgcctcacccggagcctcgagggtgcgtcatcacttgagcctgtaatgcagcgagacttaactgacaatcctctggctcgcttcaggtcgcaccggactcacgccagcgcggtttccatatctcacggctgggctcgggcgacggaaaggggtcgaccccgcccaagactcgacccaagtcgatgcatgagctccagatgtcacccgattcgaaccggtcatcgacgacgctgggcgactcgccagcgaagggctcgagatcgaacccgggcagcccgatccgggacaaggacctcgacttgccgaacctcaagcaggtcaagtcgtccacaaacatcccgatgctgccacagtcgcctccgatcctcgtgaccgacacccagacgtcaaagacgcggagcctgcacctttcgccaccgtcgtcgcccccgatccggtccggcaatgtctccaactcattttccgaaaacgcaaagaagcgtcggtccaacttgaagggcctcgagcacctgacgctcagcatgatccaggcccccgtcaagctcactaaacacctcaccaatacgggagccggaaccccgccggagggcaagatcagcggcgagtacgactactttggcgcgaaggcgcccaagacgccgatgacccaagaggagaaggaaaagcgcgcctgggagaaggagaagcgccgccgcaagaaggccaaggagaagaagcggcaggagcagatctttgtgagcacgcttcacccgcttggctatgtcgctggctgctgatcgaatccttcacgcagatcacgatgcacgtcgccgccatcctcgctcgacaggacttcctcctcaagctcactcgggcgctcatgatgtttggtgcgtcgcatcggcgtccattataaggctttcctcgctgaccctgccacccggctttgctacaggcgcgccttcgcaccggcttgaggcccagatgcaagcgaccgctcgcgtactcgagatcaactgccagatggtttacatccccggtgtcatgctcatctcgtttggcgaccctacgacgcacacgagtgaaaccaaggtgcgcttgaccctcgcgctggtcacttcccgtctcgcctactgacagctcttttctctcagttcctgaagcaggccaacggcctcgatctcggcaagctgctgtcgacgcacatggtttactggaatgtgcgtcgccgaggcctcgccttcacgcgtcctatcgacagactgaccagctccccattgcctcgacgacaggtcgttcacgacaagattggcgtgacggaggcgtccgaggcgctcgacatgctcatgacggctaagccgacgtacaagctctggcagcacctcctgatcggcggcctggcgagcgcactgatccagccatcagccttctacggatccttcatcgtacggcccttgctcttgctactttgtcgatttgagcaggagctcactcgatgtctgccaatcccacaggactgcctcgtctcgatcccgctcggaatgctgctcgtcctcatccaagtcctcgtcagcaggaacgacctgtactcgtcactcttcgagtcagtgctctgctctcatgcaccctgagcttcaaccgtgactgatccgcctcctctcgcgtgactcaggatcgtcattgcgagtacgttctcctttgaccatgtatatctgcctcgttcctttttgctgacggtcccttctcccgaccggcagccatcaactctttcctcgccgcagccatcgcctcgtccggccagttctgtttcgcctcggtcgcctcgggcagcgttgttctgatcctcccgggctacatcgtcctcgtcggcgccctcggtgagtgccattcaacggccagcgactgccccacgcaatcaactgacgcgaagatcacaacgatcggcagagatcggcaatcgctccatgatctcgggctctgtgcgcctcgtctacgccgtcttgtactcgctcttcctcggcttcggcatagcgtgcgtcttctgagagttcatttctgatagcgcgagttgacatgctgcgattgtccatcagaatgggctccgagatctacatccgcatcactggcctgccggttgccggctcgaccgactatacgtgtcaatcgctccgggacaacgcgccttggtaccgggcaactatttcgccctggttctacttcctcaccgccccgtgctacctgctggcgcttagcctccgcaacggccagccgctgctgcggaaggagacagtctacatggtcgccgtcggctgcgctggcgtgagtctcggcgcgagcgtcccctcaccaaggtgggctggctgacgtctgcctttcttttcagttctgctgcaactacttctccggccgtgtcttctcgaaccggcccgacattacatctgccatcggcgcctttgtcgtcggcatcctcggcgggctctatgccaagctctcacgcggctcagccttcgtcatcatggtgcgcttgcgtgcgcgaacatcaagggcggaaacatttgctgacgcagcctaattatttgtcaggtcgccggcatcctcttccagctgccgtccggactctcaaatggcggcctgctcaagtttgctgctgagacgaccagtgccgacgacaacacgaagaaggaggcctacagctcgggcttccaggtcgcccagcagcttgtacgtctgcggttcacctcaagtcttgtcctgatcgtccaacttgttgacactcgcctcctctcggttcctgcagatccaagtcgcgatcggcctcaccgttggcctcttcacctcggccgccatcgtcaatctgctaggcggtggccgtcggcgcggcgccaacctgtcatccttttgacgtaccctgtccaatctctgtctcgtaccttcctccgcatccaagtcgtatcggcgcctcgcggcctgagcagcatccgcctcgtcccctcatcagggctcctgctctcgagactcacttcacgttgtaaaccacctcatctggcgctttgatcgcctggacatttctcgctagaccgttgcttcgcttgcctgcaccccctagatccgggggccctcttgcccccctccccttgcttagaagatgccatgggcgcgttcaagattcgtcacttcaggttctacaacagacttcggtgtcatctactgttcaagggtcgatctccttggcctcggcagagtgcttcttgaaaagctcctcagcccgggtccagacgccctcggtcttgcggttcgggaaggcgaggagtgacggcaggagcgcctccgagaacgactcggacgactcgcgcgggagctggacgaaggaggacgacacgtcagctctaaattcgacggagcgcgacagggtgggtggctggctacgacgcaccagagtcggaaggtggtcgatcgagacgaccgtcatgaccgggccctcgctaccggcgtcgacgtcgacggtcggctccgggaaggtcgtgttgattgagtagatcgggagcgggttgttggggttggtcgtgctggcgcgtcgtcacaggcgtgtcagtttgtcgtcacagggtgtcgggtcagagagtagagtgtgagaacgctgggacgcactcgcacgagacgtcgacgagacaggcgagcttgcggtccgggccagccttcttgaggaagtcctcggtaaggaacgagggaattttctcggtcaggtagatgcagttgacgaggatgtcgactgaagtgcggaagagtgaagtagatcagcgtcggcagagaacactgccgcgcaagggagggacgcggtgcaccgtcgaggaactccgggaaggggccgcccttggacgtctccgccatgtcccacttgaggatgttctccctgcgcacgtcaaagggtgatcaggtcagtcaattggcccgccagagaatttcggggtgtcacgcaacgcactccttgaggccgaccttgcggaagaggtcgacggcgcccgagccgcaccggccgagggcgccaatgacgagcgcgcggacgggccggccgagcttggcgagctcgcccttgacgacgtcaaccatgtcgtgctcgttcttgtacggcttgaggccgccgagccgaccgccgccctgctgggcaccgacggcgaggcagccggcggccgcgcccgcaaagccggcgtggaagccgaaggcggcgacacgccggccgttctcgtcctggaggaactcgaggtcgtagagggtgccgccgccgttgcggaagcgcttgaggacggccgaccagccgccctggtgcttgtagcagtgggcaaactggatgtgcgtctgcggcaggggctcctcagactcggtgagctccttgaggccgatgacggccgtcgtctcggggcagtcggtgtgccacgagtcgtgggcgacgagcttgcagccgacgctgaagagatgtagagtgtgagaggtcagctgagcggcctggcagagccgtcctccttgccggctcgtcaagcgcagccgcggccaaaagacgattcgagagggaaaggaggggacatacgcctcgaactcggcgtcgtcaaagatgcgctgcgggtcgcgctcgaccgtgatgtcaaagccggcgtcgagcagcttcttggccgtcgtcggcgtcagggccgagctgcgagcgggaagaaagcgtcaggcgctcgcagcaagtgagggtgatggcaacggcggaggccgacggaccggtgctcgaagggtttggtttcgcagcggagccagagagcgggcttggggtcggaggacatattgaaagggggctgggtagagcattgattaggcctggacaagcagatcaggctgcgagacggttacgaacgagaaactgttcgttcaggagaggcgagggcaagatgggagtcagggctgaaaacgaccaagacgctcggcggcgcggcgggtcatgcccagtgccaggatcagagctggctgagcctgacatcgacctccgccgcccctctgcgaaaaggcccttgagcccgacctgcttcgacattgacaccaacgcaccctccccctccgatccaccctcacccacctcgcctgtatcggtactccgtgtatctgtaccgcccgccctccgctcctctcccagccttctctatccagtcatgcccagcagggaggtcacaatcgccatcggcgtcggtgccacggcctttgccctcgtcgccggctacgccgcctactttgactacaagcgccagaccgaccgcgagttccggcgcaagctgcgtgagtccaagacttcggcgagggatgctgcgcaaggatcgctcgacgctgctggcttcgatttgcgagggtgctccggcaatcgagagccgagccggcgtccgaggggaaggagctcgtccgagcttcaagaggaaccgctgactgccgcatacccggacctcgcccatgcaggcaaggacaacaagaaggtctcgagccacgtcgaggctcacaagtcggccgagcgtgccggtacccgccaggtccgtcctcttttgcctgccgatcggcccatcaagctgactgcgagacagagagattgattgatcgttcctcgccttcgcaaacgcctttcaggacctggtcaaggccatcattgagatctcgcaggagccgacgccccgttcgccagaggagagcgtgcgtcggcctcgctcgacgcgtagtaaccgccaacaaggatcaccccgctgactgcctcccgcctcgtcttctgcccgcccttcaggagaagtacttcatggagaacgtctcgatcggcgagcggctctcgacccttggtgcgtcactccgcccgctcgcttcccctcctgcttctacgcacactgcggcgcattttgctgacctctcatccttgaccgcgtcctatcaggccctgaggcctacatcccagccgccctgtcgttctaccgtgccctccggatctaccccgcccctgcggagctcattggcagtgcgtcctcatgctttcaaaccccttctcggttcccaacaacggcatctgactcaccctactctccccgcttgcagtctacgttcgtcctttgtgactcggtgcaacttagtcgtcacctcacgcggctcgctgacctcagcctcattcgctcgcactacaggagaagactgtcctgccccctgtgtttgagatcgtcaaggagctcatcgccctgtcgaacgccatcgcccagacgacgcagcaggcccagcaggctcgtcccagcggcgccgacctaggcatcgacggcgccgacgaaggcgacgacgaggaggccatgatggaggcccttcaggcggcgatcgccggcgctggccgcaactaaaccaaggcgagagctggccggttggcgtgagggaggctgcatgagagggtcgccgagtagggtcgacgctacgtgctaaggacgggaagagggaaggaggtccagacctggactacaccgcgtaaggaggaccgttggacctcttgcatcacttcggcccgagatgaatgtcgccagcacctgcctctcgtcgatgtggagcgccagctgagaggggactctcggcagaggacggcatcgtcccggttggactgctatcgtggcggcactcttctgagtgacgaaagagtctgagaatgcgggccgcttcttctggaaaagcctgtacacggccgttggggtgggacggataaaaaagtgcacaaacgacagagctttcgcaacgcccgccctaggcaaaaggatatgtcgctgacctgaatcgaacaggtgaccttacgatcttcagtcgtacgctccaccaattgagctacagcgacgtttgatgacatctgatccagatcagtcaatatatattatttgagcagactcaatagccgcaattcgctctccaggtgcgcgagacgactcgagcagggcgccgtctctcgcccgacctatcgccagggcgtacggcgagctcgctgctccttgctgacccggcctgccgtacctctcagcgtccgctgacgctgacgcttgcagctcacctcccgtcgtccggcgctcaacctgactgctcgatgaatctgggctctcgacctggctggttgctgaccccgcctgagcgctcacgactgacgacgtgttgacagcacttccgcgaccgctctgcgagcaggcctcgaggccgattcagagacctcacgcactcgctctctcatccgccagccgttgtcagccgcagcgtcgctagctctccgtctcgatctgcaccagagctgacaagacgtgggctattgcggctttctcataggtctggccaaggtgggttgcccgctggctttgacttaaagctgccttcctcggccgccctgaagttcagttcgtctatgcctgtggcccctgtcagtggcgcatcttcgcaccacatgttgacttctgccttttgtccgcatgctcagcttccgtccatcgctggcgtggacggccgctgccagacaatcgatacggaggcacgcgcgcaggggagagggtggcggtgcggcatccgagaagagggcgtgaggggcatgcgctggcagacgagtaatggatgctctcagtgcaactgtcagagcaacagggcagcgcaaggcagcatggaaacggtgacgggcgcctgggcgagccggcggggtgccacgagccatctaaggccttctgaggggctcgcgaacgccgtcaggccttacactgtgcctcgggcagcataacgggccacctgcagtaactcagccatcctagggctgacattagggagccgtatgaggccctgcgatgccctttcatccggaccatttgcaaaccgcgtccctattctcctcagaccaatgactaccccctggtaaaaagaaagcagcgcctcctcgctgagtctcaagtcgtagtatcgcgcgctcgagatgtagcccgctgaaagtctcgtcacatgaccagttcagcggaaattgctctagagctcacaagcactcctgcaacggcggcgcaggtgcacctggtcgagcttgtggctggccctgttgcgactgctgagttgcttgaggatacacatggaccggcgtgggctagaactcatcaaaggtcgctgtagctcaatcggtggagcgtacgactagagatcgtccaatcaagcggaaactcatcaagactgcgcgacctggaggagacgccctcgaagcaaggctgctgaatgggaaatacaggaagagatgtcgaagtacaacaggagggaccaaacttggctacactgcgagaggagaaaatcgaagacgaggggggggggggtaatcgagagagcaaatagctagacagcggcaatcatcggcgcctcctcgatctccttggccgcggtcgatccagcggcgcccttggcagcgacgtcctcggccagcgcggcctggtactgccggttgatggcgagcaagagacccttgatgagttcgacatggttctggacgtcctctgagacgaccggcgtcgctgccgccgtcgaggcggcggcgtcgagcgcgattgtgtcgacgccgtgaacgagctcttccgtcacagactgctggcgctgggccgaaggcttgctgtcggtctcggcgagggcggtccggatcggagggagggcaatcgctgggtagatcgaagacagcgagggcagagttgtggccgacgtggccggcagggcggctgccgccttggctggcggcgtgtcaggcgacgactcctcgtcagacgagccgtagctcgtcgaccggatcgaagagtagtgggcgtcatcgtgctcggctgaggtcgtgcgggggcgccggccggccgacgagggcttgtccgaagacgaggctgcctcggaccgcggcagaatcgacggcagacggtactcgggtgggacaacctcgagaccggccggcaggatcggcgaccgcggatggtcggtgctgccgttgctagttgccgaggtcgacgaggacgggccagcagccgagaggaacggctggcccttcagcgcgacatccgacggcgacgacgccatctcgacctcgacctggtcgtccgacccggcagggaccgacgatgcacgcgaggacgcaccgacgacgatgcgaggcagcatgacgcgcggccggtggtcgtcctcgccctccgtcaagtcaccgccgtcttcctcgtcgtcgtcctcaggctcatcggtcagcggtcgaccggagctaagcggctccatgaacttgaacgttttgcttgggccgaagagggtctcgttcgggtagaggcccgagccgacaggagccgctcgtggcttggcgagcgagtcaaacgagaggttgttgagcccctcgagcgcgtagctcgtcagcgagggcgagtcgccgccgccgctgccaccgttggccgctgccgagggatttgacagcgacatcggcgagaggccgtggttcgaggtcggaggtgagaaggccgtgtacgtcgtgaaagggtccatcgcgcccgaaggcggcgtatcgtcaatggacgacgtgtagcccgacgagtggtacgaagccgtcgagggcgagggtgatgagccagagtcagacgactggagcagcgtctggtgaccgagagacgggtgagcggccatgcccaccgaagcagagccggcggacgagacgccgctggggccgtggtagctgccgctgctgctgccgtcggcgaacatctggccgccgccgccgccggtcgagcctgagaaggatgacgagaggcgcgaaccggttggcagctgagcgatcggccgcgacgcagccgacatcgaccggctgcggtgaccgttgtccggctgaccaggcagggacggatagagtccgccgccgccagcctgctgttgtagctgctgctgctgttggggcggctggtgcatctgatgctgctgctgttgctgctggaggagctgctgaagctgcatctggtgggcggcaatctgctgctggagctggatgttggcgaggatcgacttggggtcaagtccaggcatgccggcgatgccgagctccgacaagagcccgaggttctggtccatcgcctgctgcggcaacggctgctgggactgaggctggccgttcgctccgtacggcgccatcggccggccgttggcacccataaaagccggcgggagcgggtggccggccccgttcaggaggctgccgagcccgaccggcgaccggccgtggcccatgccagcgttgggcccgccttgattgagactttggaggagggcatgggcctgctgggcctggagcgagttgacgttggcgccgccctggccggccgcctgtgcatttagcaagaggctgaaaaggaagttgttggcgttggcgacgtcctcctggttgcggaagtcgcccacgaggttcgacgccgcttgcgagtagacctcggcgctgcggtcaaacggctggccgttcgggccccgctgctgctgctgagatgactggctcgagccgttgccgccagagccaccaccagcgaggttgttgagcgacatcgggttctggcccgggaagccgccggcgccggcgcccatgccgcgctgaagctcctcaagccgacgggccatgccgtggtcgtacgtcggctcaaccttgcgcttcttgacctcgtcaaagaagccctcgaggtcgtactggcgcttttggccggccgaatacgcctgctgaccgtttgggccgccgatggcctggccgttctcgtcccagctcgcccggccgccgacgccgagcgcggcgttcatcgcaccgccgttgatagcgctagcattgtagaggccatcgctcatgtgtgggtagccgttgaagccggcctgctgatggggatgcggcagtgagccctggccctggccagcctgcgggtgcgggtaggggtagggcgcgccgccggcctgctggtgcatcggcaggtggtggttgagcgaggggtagatgtcaaccgggttggcgccagcaaagagctgggccgggtacggcagcgagccgtaagggtcgaccggcggcggcgtgtggagaggcgcgtccgagccgccggtcgacgagcgaggcgaggcgccgatgtctgcagagcggatggcattgtcagtgttggttgatcgaatgggctgggccatgcacagcgagcctcaccgtttccgccgtccgagacgcccgaccacgagctgcccgacttgccgctgctgatgctcgtccgcgagcgcttgccctgcggcttgccgctctggctgccgtcatccgagacggccgccttcgagtgcttgtgggcggtgtggtgctcctgcgtgtgaatgcgctcgtgcttcttcaaatcctgcggccgcttaaatgacttggagcaaacctgcagaggtgggcgagagggaagaggtcagggacgggtcgcacgacccacgtcacgtggggctggctcgtgtgcaatgcaagaggaggccgcacgctgcaggcatgcggcttgagtggcgtgtgtactaggaagtgtcaaggatgcaaagacgagtgtcagtaagagctcagacgggcactgtcgcggtggggagccgtgtgggcggcgcgcgccagagtcgttgggtcgcacctcgcagatggctcgtgatgtggtcgcgcttggcgcacgtcgtctcgcagccacgccagtggcaggtcaggcagaggttctgcgtgctcttgcggccgatgtgactgtgaggttgttgatgaaggagaacggatgacgggacgaggggagggttcggacgcagagggcgacgagggaaagatgccaaggcttcgtcagtttaagcctcgagcacgggcccgcacgctcgacttctgcggccgccgccctttgcacacttcgctcgttcggtcgcccgcgcaagcacaggccgcgcgcgagccagacgagcaagacaccgacaagttgagaggagcacgtactcgttgcagagatgcatgtagagcgtctcggggtcgggcgcgaccttgtcgcagccgacccagaggcatgggtgggtctcgatccgcggcgcctggtcttgcggcgggaggaggatgcgcgtcggcggcgagccgggcgtcaagccggacgacgacatgcggggcggagagcgttggctgtgactggctgctgtaaagaagaagaggttgctggagggggggcaggaagggaagggtcgcagtggtggctgttcgctggcttggctcggcgtccagccggcgagctggccatgcgaccgcgcgtgcgtgtctgctttcgacgggcgcccaaactggggtcgctgggattttcgtcgcctgctcggcggcctgcaggcgcagctcctcccccctccgtcgtcctcgccaccatcctcctcgtcctctcccgctccttctccagttgccagcagctcgatcctgacactcacggcctccacgatcaagccgctatccctcttgaagcgtcccttttgatctcctttccgccatggtccgtcctcgcaagcgcgaacctgcgtctcaaacctgcccctgacggccctgcgctgctcgtccttcagatccgccgtcaagcccgcgagcgccgcgagtacatctacaagaaggcgcacgaggctcaggagcgggccatctatgaccgcaaacaagcgatgaaggacgcgctcgcgtcgggcaagccgctgccgaccgaacttcggaatgaggcgcggacggccggccgcgacctcaagtacgacgaggcacaggccggtcagtacgcacgatctgctcctgaaggctgcagggaggctgcgagtggtgcgacagggtctcaggaccgcttggatagggcttgggtgagcagcagaagctggggcgcctggcagcggagctcaccgagcaacgctcgccacttggctgggcgtacgcacgatctgcgagtagggcaggcagccgagtgacgaccgaagacactcgaggtcgtattttgcagattgcacaaatgctgaccctccggattgttcgtctcgcactctgaacgccgtagacccggccgaccacgtcgacgacgagtactcgcgggcaggcgttcacgacccaaagattctcctgacgacgtcgcgcgacccgtcgtccaagctgctccagttctccaaggagatgcggctcgtcctacccaacgcacaccggatcaatcgcggaaattacgtcgtcaaggagcttgccgatgcttgccgggcaaacgacatcactgacctcgtcgttgtccacgagcaccggggtgtgcctggtgcgttcctccaccgcccagagcgccttgcccttccaactggctgacccaaaaagctgacccccggattgccgctatcctttgctgccctcttccagacgccctgattgtctcgcacttcccgcacggcccgaccgtcttcttcaccctccacaacgtcgtcctccggcacgacattgcctcgcactcgtcctcgaccgtctcggagcagtacccgcacctcgtctttgacggcttcgagtcgcggctcggcaagcgcgtgatggacgtcctccgcttcctctttcccgtcccgaaggaggacagcaagcgcgtcatgacgttcgccaacgagggcgacttcattagcttccggcatcacgtctttgcaaagacgtcgcataagtcggtcgagcttgccgaggtcggcccgcggttcgacatgaaacgttcgtccaggccttcgcgctcacctgcttctgcctgcgctgacaaactgctcgtcctaacagcgtacgagatccgacaagggacgatcgagcagaccgaggccgacctcgagtgggtcctccggacatatcagcggacggcccgcaagaagaggattctctagatacccttgctgtggggacccggctgcaagatcagatgggcctctctcctccgctggttgacgggcatcgtagctttgagagctgagcgagcctctgggggacacgctgctgcagtcagggcagacaggcgacagcgcagggcgagagcagggcgggagcaggccagcggcatgaatctgacaggcgtcttcggcagcctggcgacgtcgtctcatgggttgccatcgggaccagtcgcgccaccaacggtgcggacgagctcgtcgaggacacccggctgcatgccatggcgttcgccgacctggacgcgcgccctcatttcggccgcctcggttccgagaacctcgcgcctctcgatcgccttggccgtgcgccggattgggccatagaacttctcctctttgccggcgaggagcggcttgatgacctcgagcgcgacgagcgcggtctcgtacagcgcacgcaggtcgatcgtctcgacgtcgtcccagtcggtgccggctttgtcgggaaaggcgggcaggtcggcgagcccggcgatcagcttcgccgcttgagttcggccggtgacggccgtattgaacgttgccgcgagaagctgaagcgcgccgagcaggacgaacgggtccttgggtgcgtggaggagcgccggcgagatgaacgagcggacctggccgtacggcaggtcgggcaggcccgagctgttgggcgagctgatgccgccttcgtccatgcgctcgctgatcgacgagaggatccggaagagccgctggcgatgaaagttgcgcggcgcccgaacattctggccgtcccacgcagagtagactttctcgctgctgctatagcgagggtgtcgacgcaggtagtcggccgacagaatcatcggggccgccagccgcttagagacgttgaagtagctcgacacgtttcttggctcgcccgtaagcttgctgctgggcctgctcgaggactcgtctgcgtcgtcaacggccacccaccaggtcggcccctcctggagaacgcgttcctcgagcgcagcccgcttcaattcggccgaagcggacgaatctgcgaactcggtatagccccgaagggccaaaagaaggatatagggatcctccttttcagcctgcgtggccgaccgctcaagatgccgcataaactcgtcgaggagctcgagcgtctcgggagagtcggtgagcgatggcggctcctcgtctggctcctgaacctcgcgcacgtccggccaagcgacgaggtcctggatcaggaggcgcgcccgattgagtctgaaacgctcctcgtcctggaacgctcggaaggcatccttgtagcgtttgatgtctgcgcggggagggcgtcagccttcgttggtgtcttttgaagaggagcacgctcgataacttacagacaccgtcagggtccgaacgctgctgcgcagcccacctcgctcccctgccagcgttctcatccgggccaaaggtgaggctctcgagcgacaacctcctcgagtgcgccggaacctcaggcttcgactcgtcttcgatgctgatgctctgctcttcgttgcgcggaggctccgccgcgggcgcttcggattcccatcgctcaagattaggcggtgaactgtcggcaatgggtaggcgcctggtaggatgactcgagcttgacgcgctagaggccggcaggctgggaggcgcaggcggctggtcggaatctgcgcgagtcgcatcgaagccggtcaggcctcgggtggcgtctgcggatcaaacacgataggaaacacgcacagcatcgacgggcgacccgagtcccgatccgagctgctagtggttcgatgacccagacaacagcttgcggctgcagtgccgctcttagcatgctgacgggctgaggcctagtcggagggagaaggaagggcagcgagggggcggccaatgtcctgagtgggccggagatcgcagctggtggactatgaatgtatcaggagcttcttgaggccgagcttgcttgcgcttcctttgtcgagctggctggtggcgaaagagagaggtcggtgtcgagctgtcggcaaggctggcaggcgaaagcgagcggtcgcctgcgccgtcgtccgcttacactcaacaccgacccgcctcgacctcgcaacccacctcatctctcgccagcagacaaatcaagacctgctcggacgtcgccagcaaagagccagctcgcagttatgggtgcgtcgcctgctgcgctttgaaaaggcgggctgtgggacctcgagtccgcggctcgacctcgtcctcgacctcccgagctcatcccctcatcctgcggcatgtgctacagactaccagaaccgtgtgggatcgaagtttggaggcggagggccggcaggcaactcggaggccaatgtcgaccgcagggagcgcctgcgcaagctggccatggagacgattgacctcaagagcgtgcgtccaggcactgccgtcgctgccgccttccgaagctgatccgtctgcctggctgcctcttctccaggacccgtatatcctgcgcacgcacctcggtacgatcgagtgtcggctctgcctcaccctgcacacgaacgagggctcttacctggcgcacacgcagggcaagaagcaccagacgaacctcgctcgccgggcggcgcgcgacgtcaaggagggccagctgctcattacgctgccaaagacgtccgaagtgatgaagaagacgtttatcaagatcggtcggccaggtgcgctcgtctgtcgcccttgacgtgtagcagttgacgaagagctgacgcgcttccctgccaccgactcgctcaggctacaaggtcaccaagattcgggagcccgaagagccgcaccggctcggtctgctcttccaggtcaacctgcctgagatcaaggccgacgtccagccgatgcggcgcttcatgtcggcctttgagcagcggcgcgaggtcccgaaccgcgcgattcagtacctccttgtgcgtctacctttctcgcctagtttcaacgggctttttgcgacggtgactgaccttggcgccctcgtttggttccctccgccctttgcagatcgcggccgagccatacgagacgatcgcgtttgcgatccctgcgcgcgagattgtccacgaggacgccgaggaggccgagaatgtgacggcaacgtgggaccactgggacatcgacaccaagacttaccactgccagctcctcttcaactcataggctgcgcccgatcgctctttgacgtcgctgcggacgcgtgtatgggtagtatggccggtgtttaagagtcggcgagggcagctcaggccagtcgtcgcaggcgaggccgagtcaggcgcacagtacattcaacaggggaggcgcaggctacaaaggggagaggcagaggttgagaggagggggttgtatgctaagggatccggggcgctttcgagacgttgggcgatgcaatgctgaggttgggtggaggccgtgcaagtgagacaggatccgcctcacttggcgtccgtcttgccgtcggcggccttcgcggcctcgtcgttgttgtcgtcctcgtcctcgtcgagcttcgcaaggtgaacgcccttgaagcgcttacgctcttcgcgggcctcctttggagccgacgtctccttgtcggcccccttaccctcggtctcctcctcctcgccttccttcatctcgtcgtcgtcatcgtcgtcgtcgtcgtagccgtcgagctcgccccagatccacgcccagccgccctcgtccttgccgccttccttggccggcttgcgcgcccacttgatgccgagcccgacggtcgactcgccgccctcggtccggaggccgtacgtcgcctcacgaatgacgacggcgcgctcgtcgccgtcggcgatcgaggggcgctcatcaaacagggcgtcccagagcgacgacgtctggagagcgtagggcgaggccgcagtgaggggatcctcgtactcctcctcgtccgtcttgtggtggaagcctgtgtggcggtttgaagaggaggagagaaaaggacggcacccagacgacccatgaagccccaaggaaagatgacacgcaaaggaaggaggtgggtatgagcaggccgatcactcggtggcgggcgggagacggaacgcagaacccaagcgcttcttcgaacgttgtgcgcagggtgcaagctggggagcatcgcgccctggcagaaagacgatagaagaggcgaaggaagcgaacggactccagcgctgcgagatgactctgggggtgtagtgtggccttgggctcgtctcctctctgcggtttccctctttgggacaggcctctcttccctatctccgtcccatcttccggctcggcgccgacatgtcgcctggcgccacagcgccctcgtttgggaaacgccttggcgggaggactaggacgcaccgtcaagctggacctgccaggcggtgccgtccgtcaggtagacgttccggccggcgcgcttgacgatgcgagcccggccgtcgggcgtcaggcggacctccttgcccttgaggacctcctctgggtcgagctggcggccggcctcggcgagcgtgatgggcttccagagagccgtctcggctcgggcaatctttgcgacccgccgggcctggatgcgggcgagatgggcgacgttggcctcaggcgtcgtgggcacgggcgagttggcgcccgagggcgaggtcgagtcggcgagcgagagccgcgagaggagcgaatgaggatcgtcggcggtcattgtatagagtgatgtggaggtttgatgggaagatggagatgagggagatggtggagatggtggggaggatgagatggggcgagcggccgacgagcgctagaggcgccatcgcagggtcagccggcctcggcccagagattgagcctgctgcgcggctcgacgccggtccctcggatccctttttgatttttccgaccctgcctcggcttcggcggccgcgcgctgtcgcctctctctcgccggggggggggggggggggggggggggggggggggattgagcgtcagcgagcgtttggattcgagagactcggctctgactcactggaagacgctgtagaccgagcgcaagaagggcgtgccgagctgccagccgatgccatcgccagaagggggaagcgcgaccggccaggcgaggcactcctgagtgttggtcgacacgcggccgatgagccactcgctcggctggaggacgtagtcgcgccctccaaacgagaaggacatggtcgcgcgcgtcttgcaaggcacgatccagacgccgtccgagaccatgcgcgagccatcgaccaggctaaacaggtattcgacgtcctcgatcggaccaaagatgccggacgcgcccctgaagccggagcttaagttgtcaatgatcgagggcaatgtacaagggagtaagcagccgggacgtagacgcacgagtcgatgagggcataggtcgcgttgcgcgtctcggggtaggcggccgaatacagcctgaccggtgcggtcccgttgacgttgatatttgtgagctgaaccgcccactggaggaaaggcgaggacgtgttctgccgcggtgcgctcttgaagggtggaaacttgacgacagggtgccactcgatcaggctctgatcggtcacgacgtcgccgtcgatcgcgcctagcgtgagcgagccgccaagtgacgtgttttgcagcaggtgcaggccgaagagcgggtagccgagcgaggcgttacgcgcgagtcggctgaggacgggcccgcccaggccgggcgaggcgttagtgtagtctgcaaaggccgagagccggggcggaccgaggccgaagaggccggagatgtgctcgctcgcgagcatcaaattcgtgctgttaatgagaccgatcaattgatcgtcgaccgcgagccgattcgcctgcgggccgacgacgccgccccaggcgacgcgctcccttgccgcgaagccgctggcgaccgacccgtcggcgaatcggctctcaaagcggctggcgttggcgttgactggcgtgaaagattcgctccggtctgggttgtagagctcgacgtagggcgtcgagggcgaggtatagtcttggaggacggccgccggcaagcgcgcagacaggagggccttgcacgatgccgacgagaggcagagcgtcgaggccaagagcaggtcggccgaggcggtgtcctggagtagcaagagacggaagagtcagccggcaggccaagcaggatgaagcgaggatctgagccgtacgatctgcaggtagaaggtgtgcggcgggctcccgacttcgaccggaaccgaatacgtcctgcacgggatcgcgtgcacaaagaaggtcagtgcgagcgacggcgttaggtagacagctcaagggacgcacccgccattctgcacccagccgagagcctcccagacgacgtcctcgtcccccgtcgtgttgctcgcccgcctgcgcagcccgctctgaccggtgaccatcccactcgcgcccaccgagctcccgcgtccgaatgcgacctggctgagagtgtgtgcgtgcagggcaacgcgctgagcgctggcactggcagctgcgagaccagagcggccacctccgagcaccgggagggcaagcgccggcggctgggcgacgaacggcgaggtcggggctgcagagacaggtgacaacgagggcaagccgagcgcgagtgcgacgagcaggagtagcggctgaggcagcatctgagcgcgaggcgagttgagtcgagcggtggcgtgaaagatcttcgtctctccagaatgctcgaggtgctttcgtaagtggaagggcgaggtttgagctgggctgggctgggctggctaacggagtcgaaagtagctggctgttcggtcggaagtcgacggcccggcggcgcgcgatgtgaatcggctgtgccgccagccggtgagcgtcaacgtcggcagggccgatcgtcagccatgcctctcctgaccatatagacggcactatcagcagcgtctgatccgaccgatgacagccatgcgactcaggttgacgcgagcataggcgatgggaggagccagcagggccagaaggaatcggccggccgacggacgagcgacggccgacgcggagcgaaaccgggaaaccgagacgaggctgagcccgcgcgtcggagggaacgagagggaaggggcgagggcacgacgagcctcaacgtccatccaaccttcctcctctcgcttttcttctctcaaagatgctctcccgctccgtcttcagcagcgtcactcgcgcctcccggtcggtgcgtggtttctgctcatgatctgcgcttcgggcggccttgcgcacggcctgcgacgcccaaggctgacttttccttctctggcctcctcccgtccttctcccggacctgtgtcgtgacttccttgtctcccggtctcgctccttgcctgatgtcagtcgcgctcgtacgccacggcctacgcatcggcccaggtccagggtgccccgacctcggtctacgcctcgcagaagaactcgaaggtgcgcgctctccctcgcagtcgttacaacagggtcgcacgggagggacgccgtggttgtcagctggcagcccagtagctggcctgctgggctgaaaaggtcgccaggaggggacggtcgcaggcaacttgatcgtcgaggcttggaggcttttcctcggccagcagcattagagatggggtactcaggctgacgtcctgcttcaaccctctttgcatctcatctttagggcaactacaccgtcaccctcatccccggagacggtccgtcctgcctgcatggcggctttagtgctgtcgcaagccgagaggaggcaccctgacgcccatctgtctcctatgcaggcattggccctgagattgccgagtcggtcaagaagatctttgcgaaggctaaggcgcccatcgagtgggaggaggtcgaggtcaccccgatcatcgtcaacggtaagtcgcagatccccgacgacgccgtcgcctcaatcaagaagaacacggtcgcgctcaagggcccactcgcgacgcccatcggcaagggccacgtctcgctcaacctgacgctccgccggacgttcaacctctttgccaacgttcggccgtgcgcgtcgatccagggcttcaagacggcctacgacaacgtcaacacggtcctcatccgtgagaacactgagggcgagtactctggcatcgagcacgagctcgtccccggcgtcgttcagtcgatcaagctcatcacgcatgacgcctcggagcgtgtcgcccggtacgccttccactacgcccaggtctgcggccgcaaccgggtcaccgccgtccacaaggcgaccgtcatgaagatgtcggacggcatgttcctccaggcctgccgcgccgtcgccaaggactaccccgacgtcgcctacgacgaggacctcctcgaccgggtctgcctccgcatctgccagaaccccgacccgttcgccaacacggtcctcgtctcgcccaacctgtacggtgacattctttccgacatgtgcgccggtctcgtgagttctctctctctccactcgtaccactcgcccagcaacccagcagctgacgcacgactgctctcatcagatcggtggcctcggtcttaccccgtctggcaacatcggccgggacgcttcgatcttcgaggccgtccacggttcggcccctgacattgccggcaagggtctcgccaacccgactgccctcctggtacgtctcaactttcctggccaccttatagacgctcttgaggccgtagatcgcacggaatggctgatttgaccccggaaatcgatagctctcgggcattatgatgctccggcacatgggcctaaatgaggtcgccgagaacgtcgaacgcgccgcactcgctgtaagcccccagcccttcgtcctggctgcctgacaccttctagagcgcttctgactcccctcttctatatatatacagacgattgccgagggcaagtcgatcaccggcgacctcggcggcaaggcctcgacgaccgagttcaccaacgccatcctcgcccgcatccagtagaggagctcagcgccgtgccatgctgctcgctttcccttctctctcttcctgctgctctgactctcttggggggctgcgatctcgatgactctgtcttatgtaagcacgcgaaagaggcgggtgcaagaggctaaggtgagagggctgcttcgcggacgcttcgcccatcgcctcgcccgctgcatctgctgacgctggcccgcgacaggtcgtctcggctaagctgtgcgaacaaccatctatgccagtcttcgacgagtcggaaggcacgtcctttcgctcccacggacgcacgcatcagcgctggacattctgcgactcggcccgcttgcgctcctcgtacccgtcctcgaggctctcctggacgaggtgttcgacaacctgatcccacgtgctgcgatcctggccgtctgggtagatcgagaagtcgggcggccggccgtagccaagggtggccgtctcgatctgtccaaggtcgcgcaaaagcaagtcagcaatcagcgcgggagggatgacccgaggcagatcgccaagcttaccaggatgtcggacgaaaggcccttgatcggcgtataggtcgtccggaaacgatgcatacggtagatcgtaccagcctgcgatgcaaataagttgagatgagcgctagcctcggtagagcgcgagtcgacctcggctcgcaatgcaccttccactcgatgtctgagcggttgtagcgcccctcctcgtaaagccagtcctcgctgcccttcttgctcaggccctcagcggctgacgccgggctctcgtcccggagaaacatggacagcgggacttcccaaatgcggtcgacttcatcttcgctcgggcggaggtcggcgatgacggcatagtcggcgacgaagacaacgtgcgcgtgcacgatcaggccgtacttggagaggaatggcagaaaggtcgtcaaggggtaaatgcgggcgtcgtcgagtgggaggccgacctcttcgttggcctctcgaagctgccagaagagcgacaatttcggctgtcagtccggctcatcaaacgggcaaccacggacacctcagatgttccaactgagattcatgtttgtaatcgttctgccttgggacgccttcgttgggcaggtgattgagacgcaccgcagtgaactcgacgtgcgggtcggacgagtcgaccttgccgccgggcagggccgactggccgggatgcgacctaggatgcgcaagagggcaaatcaacattaggcatggtctacggacgaccggactgagggacgtgccggagatgctttgcccgggtcgtcattagcaccttcagcccgggctcgtccggccgctcgtagagcgcgacgagcacggccgcgcggcggaccttgccgtagctacggcagcagccagccggttagagtcaggccatacacgatccagccggagagccacgacgcggcgcactctgtccgtgtctcgccgctcttgaaggctgcgaggcggaggatggcctcctgtgactcgacagatgaaagcgcacggacggcctcgtcgagcggaggcgcgagagcgctagctgccatcacagcatcggcggacatgctgctgctgctgctgctggcctgatcgttcgtgggcaaggcagatgtcatgctggctatgactaggagtagggctggatgagacgagtggcggttgcagcgaactcacccgacggccgccgctctcgcttcgcccggagacgcgacggccggcggaaaggagcaagccgaagcctctgaaacgaccatcctgaccgtctctcgtccgtctctcacgccctctcctcctctctagcagagctctctggcctgcccgcgcttcggtctagcaagtaggcatggcatccagctcgtcggtcaaggcctcgggaagcggcaacgaccgcgacgtcgccatcgaggcaggaaacttcctcaaggagctcgaggtgcgacccggctcttagcccaagctcctcgcctccccggatgaccaggactgtctactgacgctccggttcggtcgcatgcgcgggcccttcacaggtcgaccgggtcattcagtcgttcaagctgaagtgcgcaggctgcgcccacgtcggcttcactgccccagcgctgtgctgacccgccgcctcacccttcttgctcgacagcccgtacgacgtgcttgacctgcccttcacagcgaccgaaggcgatgtcaagcggacgtaccgcaagaagtcgctgctcatccatcccgacaaatttaagcacgagcgaggtgtcgaggtacgtcttgactcgcctgcccgctcagcccacgagctggccgtcgtccgcagtgctctgacgctgctactctgcttgactgccaggctttcgactggcttaagaaggtgcgctcgagaatgatccttgggccgccgtcttgaattcggcttctgataatgcagctgcttgtccttctcgcaggcggagagtcagctctcggacgctgccggcaaggagacgatcgaccagatcatcttcttcgcccggcgcacgctactcggacagttcgtcccgccactgccgccaataacgtcagacgagtcagtcgctccattcttctcttcctggccaatacttcgctgaacgaggctctttctgtgccagcgacccgatgctacctggtgactggcggctgcgagtgctgaaggagacgcgcaacatcctgatcgacgaggaggttcagcgccggcgggcgatcaagaacacgctcgcgaatgaaggactcgaggccaagcgtcaggaggaggagattcaggagcggaagcgcaagatggacgacaagaagacgtgggagggtgcgtgccgcttggcctcaccaactcgatcgtcattgccctaccgataggaatctgcggctgatactcgcgctgcaccgacgtgcgaccctcagagaaccgcgacaacagggtgtgtccctttcggccggctgtcatgactcgaaagcctcgtgctgatcgaccttgcatccccaggtcaacgactggcgcagctttgcgtcgaaacctgccaagaaaaagaagaagagcaacgtgctcggttgaagggcagacaatttcggccccatcacccacgccttcgacgagatgtcgatgaccaacgccatcgcggctcgtccgaaagccgtctcgcgtcactcacgcgctggtgcctttgatctcaccctctagcggcagacgaccggcctgaggcacccctcctacgtccgactggggcaggttgggctgattcgagtctatctcgtcctgccgctgcattacccgtctccctttctcattgcccttgaacgactctaatgatttctttgctaaacctgggcctcaggcagcatctgacagtcgtcaggcgagaccactgctcgcttcgactgagatcaaagctgcaacgcggccgattgcagccgagcccatgccaggattcgacgttgagacccttgtattcgccctcgctactcagcgggccggcaagaaggcaaaagctgccaagcgcacgcagggccgaagtcgccggtgatcgacttgccctcggcaatcgtctgtatatatatagaagaggggagtcagaagcgctctagaaggtgtcaggcagccaggacgaagggctgggggcttacagcgagtgcggcgcgttcgacgttctcggcgacctcatttaggcccatgtgccggagcatcataatgcccgagagctatcgatttccggggtcaaatcagccattccgtgcgatctacggcctcaagagcgtctataaggtggccaggaaagttgagacgtaccaggagggcagtcgggttggcgagacccttgccggcaatgtcaggggccgaaccgtggacggcctggttccccggcccaagcttggtccgcgaccagtctgcctgctttacgtcggattcgaggacgtccagaggtgaagcttctcgaatgtgaaatgcgcaaagctgaagcgagaagcacaagttcagcaaacgacagcactcactcaagctgcaacaagtgcaggcgacggttccgcagcgacgatggagctgaagcctgccggcaccgggggacttactcccaaggctcctgctcgagcagatgctcgccggcgatccagacgtagactctcgtcttcgcctcttgccgacagagctgttccggcaagtcgccgaggatgtctacggctttgcccggcgtgagcgcctgagtagggccgaacgcaacgacggcgagcggctcaatcgcatactctggtccttcaaaggcggtcaggagcgcgacgtcgtgctctttcaggccatggacgagcgttccgcggactaaggcttccgagctggatgcaggatggagagaagtgaagatgcgtcagagtcaggagcttcagaggccagcgcgtcgacacgagcagcacctgctgagcgtcatcgcacctcgagctccggacgagggccgggtagtcctcgcctgcgaccttgaagcgcgcccagcccttaacgatggccggctggaacgtcagatggctgccgtcgttttcgatgacgctcgagaggacgtccgggtgctggcgagcgagcgaggtcaagagcaggggagctcggaaggcgtcagctgcgacggcagacgcttaggtgaatgaagtccgcaccatgagcgtgccgtagaagaagaagctcgacataggctagaggtagaggagtctcgagcgagagcgaaaccgggctgggtgatggttcgcgggctgagaggggcggctgcgcccagacttgctcgtcggccccggcggaggctgtggcccaggcaaagactccgtcggcctgtaatcgacgtttacccggagtcacaacagagatcgttgagagcatgcatactacagtggcggtgggacacagtgacaggggctagctgaagcggccggaaagcccgggggcgtgaggggaggagggcgagaggggaagaggtccaaaggagggcaatcgcttagagcgacttgggtgtacggcgggtgccgttgatcgagtagttctggtagacgatcgcggcgttctcgtacgcggcgtacgcgacccaggcaaagtagggcaggaagcagacggcaggcgagacgccgtggaccttgggcagggtgttggccttggagcagatggcgccgacaacgccggtcagggcgacaatgtcggccagggcgaggatcggcttctggaggccaaagaagagcggggtccatgcgacgttggcggcgagcgagatccagtagaggttgaggcactcgatcgccgtctcgcgcgaggccgggttgaaggcgccgacagtgttaacattcgaggcgtcgatgttttgggcaatgaggtacgagccaaagcccgagacggcgtagagaatcggccagacgatgccgtaggcctccttcggcgcgccgtaggccggggccttgagtgagttgtaccagaagttgctcttggcgccgtggacggcgtagcccgaggcagagcctgcagagggaaagaaagtgagatggtcagcatgcgtgtaggcggaggtgagacggcgaccctccgagtccgaggaagcccgaagcttctcgaacccggaggaatcagaggcgcgcatgagacgtaccgaggacgagagggatgccaacggcgaggtaggggttacgcggggcgtcccagatgagcgacggaacggaaggcatcgttgtaaaaaggagggctgaggtctggcggaaggaaagcggggcatgcaaaacgaggcgaggcgaggcgaggcggcggcagacagcgggacgcgaatgggcgggaaaaagaggagcagagtgtcagcaaagatgttctcgaggacacgcaggaccagctgcacgatagaatgtcgatcgcacgagaagcggaggggctggtttgagggtgaggtgggggtgttgggagaggagatggcgacctgacctcgctcctcttgaggcgatttcggcccgccgcgactcgccctcgaaaccaccgcgtcatcaagccactttgccttaaccctaggtccggtctccccgcggccctcgtcatgcgggggaccagaagccgtcctcctcgacgctctaagccttcacgatgaagcatgtcgctggtagggagaggtccgctggcactgcgctcgcgtctctagctgactcgtcttagttactgaccctggcgcgacgtctgccagacggactgcctcacctgggttgtcggcggcatgcgcctgtcgagcagacggagggactcgctgcttgctcccgctgctcgcttcgaagatgaggatccctcgcagcagacgaaaccactacctgtcgaactctttcgcttcgatcaggctatcgacgagacccgtctgcggcaggacggcatcccacagcagatgcgttacaagcttggcgaacgctctccaggctagccgaccacgtctcaaacaagcagggcgaggttgcttacgtccctgccgagcgagggtcgcagtaagtcaatcggtcattcctttcacttccgtcaaacgttgcgtctttgacggagtcacggccgagccgagcgccttgccacgacgtacggcgtcgggcgaagattgcttaccggagggcaacacttgctggttgtgatgcgtctccaaacgtgcagtcctgcctcgacacgggtcaaaggtcgccgtcgatgccggcggcctcttggaggtgatgctgttcctgagcgaagtcgtccgcccgcggttgaatcgacgacgacggacctctcggtcacaggcgttcattgccgagactcgggatcgacttgcgacagcggccagagaagttgtttctttcagacggctccagtggcgaatgcaagagagaacgccggaactgttcaaacttactcggtcgagaggctaagctgctgcagctgaaggtcgagaatgcgcacgcacgaagacccctgcgcggctcgaccatgatgcttttaccgcttttcacctgaagaagcctgtactcagacagtcgtgtcgttttccagcactcgatcggcgagcgtaagttatgcatgtggcattgcgtcgatggcagtacgcatgagtcggtcgtgcgccgctgcgcgtgcaattccgtcgcgtccaagctcccgccttccctcccgcctcgaccgctctcttcctttctcacaagagcttcagcgttccttccaagccaacccttttctagcatcgggtgcccgccctcctttcagcctcaagttccgcctgcgagctcgcctcggctccggtaagatgggtcagaacctcggccgaatggacgagctccagggcgccgagccgaacgcgaccatctacgaggcccagttcgccaacctgcgccagcagttcgatcaggaccgaacacaaacgcccgagaagcaggcgtacgtgctgcctcctgagtcgtaagacctttgcaagccggtgctgacctcctgcttgcgctgctcgccgagcagcccgtgtgcgtgccggcgtgcgggcgggcccctttcattcggctcaggagtgacgtgctgcccttccctactagaccggctccagtccccgaccccaaggtcgtgctcgaccagctcaaccagcgtgccgatcagctcaagcgcatgaccgccatcatgggcgaccgaggcaagaagggtacgcacgccggcggcattaagcatcactcgacgacgtcgttctctcggctcaagcgaattgagtaccggtcgatgtagctccgcaagcagcagattgggcgctacatcattatccgggtcgtcagccgggtcgtcaagaacgtcggcctcagcttcctcgggtgagtgcgatccgtcgtcgactcgctctgcaggcgatagcgcgcagcagcgggcgccactcgacgctgacccttcgttcgtcgacaggcaggagcccgaaggcaacgcgacccagatcgcgctttatacgagtccctggggctttgtcacgaccaggcccgaggtcgaagcgatcctcccgctcggctcgatccttgcgatccgcgagccgttcgcaaaggagagcggcgacggctcggtcgtcatccgggtcgactcgcacctcgacctcgtctttctcaacaaggccgatctcggagcgctcgagtggcagcagccgctgcttcggcccgaccaactgccaaaggtcctcccggtcgaggacgttaagacgatcggcgtcagtcacttcaaaaagggttggctcgtcccggccgagcgcgtcttcttgagcggcatccagtaggagcctgaccatgtcgccctcaggctcaaccgggcgctcgtccggctcaagctcggcctctggcgcggcgcactcgcagacgcaacacacgtcctcaagctcgatcggtcgaccttctcgccagcctaactcgagcgcgcactcttccgcgcaggcgcggcccaatacgcgctctagctctggcaggaggcggcacaaatgtactgggagctcgtcgccatcggctcggatgagggcgagaagggcctcgcacgcgtcacggctcggctggccggggccgagacgggcgcatacaatgtcgcagccctctgtgtcgcttggcagaaggaccctcggatgtgcgtttgttcgcagtcatgcttgccgcttcctcgtgctgacctgatcatcactgcggtcgacagcgacgccgctgactacacctcgccgagcatccgagtcggcgccatcgagggctgcggccgcggcatcattgcgacgcagacgatcagggaggacgagcttatcatgttgcaccggccgctcgccgcggtctattcgaacgagtcgccgcctctcttctcgctcaacctcatcaacggccaggtcgagtcgacgacccactcacagctgacgcagaagatcgctatgcggctcatggacgacccctcgctcgccgtcaactttgaccggctctacgctgggctcgacctgcccacgccgcctaagtttgacatctcggagctccaagtcaaggccaccgagtcgctgccgcctcttactggtctcgaagtcgtgcgcatcgagcgcgtccggacgttctgcgcgccctcgatcagccggtcggccgctgcggtcgaggtaggccctaacgacaagctccccggctggacctacgcgacctcaaagcggccggcggctctctaccttctgccgtcgttactcaaccacagctgcgctccagccgccgattctcgcttcctcggtgacgccgtcgtcgttcgggccatccgccagattgagaagggcgaagagggtgcgtcccgcctcgcagtttcgacctagaacttaaagctgactccgttcgtcgactgaatccctcgcccgccagtgacggtgtcccacgtgtccggccaggcctatgacgcccgaatcacgatcctcaaggggcgttccggcttcgactgcgactgccggctttgccgcgacgaccgacgctcgttgccagcaaagcgcgccgagcgccagcgcttgaacatgtcgctgatcttgaatccggcggtgaagatcctgacgatgccgacgcgtggcaagccgaccgaattggccaagttgcggagactgcccaaccttctcctgaaagagctagcgacagatggtcatcgttactgagagatcaaagggcgggggttcaatggctacatgaagggggagggcgcacaatggccgtcagagaaagggtagaggggcacaacggaagagagggacatggggtgggtggtgagacgtcaaggaccgtccgcgctctactgcggggcgaccgagccagcaggctgggcgtcgaggctcgagccaaaggcgggcttctcggctgaagtcgaggtcgcgctcgcgccggggacgaccgagggcgcgccggccgaggtcgggatggcggtcgcctggccggaagaggtcgaagcagacttcttctcctggccaagggtgaagggaggggcgacgagagcggaagggtggagaggggaggactggtcagtgagggctttcgagcagaaggtagggggtggggaggggacagacgtcggcaatccggcgagcctcgtggtgaacgtcggcgacttgcttcgaggtcgtcgtgtagaagtcaaagatcgaccggccaaacggcgtccggagggccttctcgtagtagtcgccggcggtcgacgagatgccgcgctgctggtccacctccttggtcttgccgacaacctgctgaacgaccgggttcgtcacctcgagcaccttagccgagatcgtctgctgcggcccggcgagcttctcgccagccttgtggtcgagcgagtggaggaacgagaggaagcgcgacgagatgccctgctggcggtcggcctcgatcgcccgctcgacaatcgtgtccgagaggtggtagccgtgggctaggagctcagcgacaatgccggcctggcacgagcgagcagcgacagggagtcagccagcggatcgaagggtctcttgagtgcagagaggtcgagggtttgcgcaccttgggcttgtcctcctgcgagatgccctcctcgcccgagacggagctcgtcgaactgagcgactcggacgtgacgtggaggtgggcgccgtcgagcgtgccctcgttcaggaggagcgccgtcttggcggccgactctgtgtaatcgacaggagcaggagaagaggtcagcacttgggcgacgtttgaccgaggacgaggcccgggcggcgcgtatcggaagcaacccccgtcctggctcgtgacgagcgagtgcaagcggctggcggtgacgcacccttctcaaagacaatgacggccgactgggtgttgtcggcgccgggggtgagcgtgatggacgagatcctgtgagaaaggaagagggtggaaggagggcgacaggggggaggggcgaggggcagaacgtcatcagcctcgagaactacgctcctcgcttgcctcctctgagacgccactccgagagggcatggactcgcgagaaggcaagccgctgtagggtctaaaagagaagagattgacgcacttgccgcagaaggagaagaactggtcgagcttggtctgcgtcgactcggggctaatgccggagacctgcaggcaagagaaggggaggtgtcagctccgatacggagcgcgtgcacctggtgcaagagcgactgacgtggatggcaaacgagggagacatggctgtgaggagagagagagtgtagagggtgtatgcgggtaagggtgaaggtgagggtggtcgggcgaggagagatgcctggcgtggcgaagcgtctttcacaggcctgcggcccggccaggcgacccttttggatttctcgacgataggccgcgtcgtcatcgcgcgtcagctcgttccgcaacgcctgtccggccgaggcagctcgacagcacaggacttatgcctcggagaagcaaagccagtgaaagcaacacagcggccggccgtccttcgacggcagctcggacggtcacacgagaaagaaggcgggcggacgaggtcctggcgtaggcccagtcgttaagggagagtcaccgtagcaatgctgccagcgccccatgcggagctgcgcgccgtcgcctctgtccgaacctgcatctcctccttgcctcgcttgcctcatactctcccttctactttctccaacagtccatccaactatgtccgacgtctgtctcttccgcacgtacctgtgttccctctgcagaagctaaatctcagccctcgctcgctcgccagcagcagcagacctctgaccagcagcagcagcaggccccggccggcctctacggtgccgtctcgggcggcggcctcggctcgtccgacattgtcaagaacctgcccaagacgactggcggcgagggtatgaccagggccgagctcgaggagaagaagcgcaaggaggccgagaacaagtagcgtgtgcgtttgagctgggatcgggcgacgtgccttggggccggttgagtgacggctgaccccttgatctctcggccgtacaaacgaataccttctgccaatcagcactgtaccttccccttcttcctctcggatgagtacccatccctttcgatacgttgtagccagtccgtcaccgcccggtggatgcatgcaggcgccggcctcagccccaacctccgcaccgttcccttgcgccgcctcccccaccagcctctagcaagcgccctttgccgagctgactggcaagtgaaccctgcttacaaggcgactcgtcaaagctttggggatcggtctggcgtcagctcggatcaggcacgccacccaggcaccacccgctaccacccctcggtcgcgtcgtgctgcgggcgctcgccggtcgcgtcgctcgaggtcaacaccaacctctttcccttcccttcccttcctcaccccgcttcccttcctctctcttctggctttctcccctcttgcagctctacccgcctttctcccttcgaccgcccgctcacccggcccgctcgcttccgacgcacctcgtcatggccttcagcccgtccgccgctccctcacccagcagcagctcctcccccttgcccgagcttgacctccattcgcccctccgcccctcctcgacctcgaccatcccgcccgcggcggcagcgcagacgccctactcgacgacgacggtggccgggtgggccggcgagcgcgcacgcgtccggacaaggacgtttgacttccggacgccgcctggcccgcccgctctttcagcctcgccctcgccgggactcgaggctggcggtcgaaaacagcccggatcgccgtcgccggcagcacaagtagagggagcgggcgagtttcggcgtcagctcgaacagacgttcgcctttgacactccgggcgacgccagcccgattcgaacggtctcgaccggcctccagtcggctggcagcctcgtcggtcgttccagaaccgagagggctctcgctcagtcgtcgtcgcctctgacggccaagccgtcgggctctcgctcagctcgcgaacgtaagccaacacgggcgcgcacgcgctcagcaacagccacggcgatgctcggcagctcgtcggacgaagaaggcggcgagggcggtggtctggggggatggaagtgggtcgttgtgcatgacggcgacgtgcgctcgaagcggcttcggcaggagaccgcggacgcgacgcgcgacgtcggcgggttgtgcgtctccttcccttctcctttgccttcacttccaacccatcgctgaccctcctttacctctccggttgccccctcttgcgcggcagactctccttgtcgctctctctcttccctgtccgccagtctgcaaccgctaccgccctccgcatacccgagctcctctccctcatcctcgcccacctctcctcctcgccccagacgctcgccgccgccctccgcgtcagccggatgtggttcagcgccgcggcgccggtcctatgggagagcgtcgcgtttgaggtgtgtggccggctgtttgagatggcgcatctaatcgagggggcgggaaagtggggaaggaaggagcggcagtacacggttggtctctctcatcctctcccactcggtcgtgggcacgtgctgaccatcgtcgtctctccttcgcggtcgccagcgcgacgtcttccccctccctgaaggcgcggccgaccggcacaacgtctacgcctcggccgtccgcgactgccacattaccgaggtcgtcaagcagggcgagagcgtcgacgtcatgatcctccggcgcaagtacccggccatgtaagttgcctgaagacgccatcagctgcgcgctgctgacgagagcgtcgctcgaccattcgctgtttacagggcgccgttcacaagtgcgtcccgactgctgcttcgagcgtccttcggcgttcggctgctgaccttttgcctgcccctttccttgcagacctccagcgcgtgtaccttcaccgactcagcccgcaggcccggtacatggaagcgttttgctaccaagtgcggcctctagatcttaccctctcgcaggctgttgacggctgatcgcatctcacatcatcgctcgccaggtcaaacacccggagatgtcagtcgctagcgtccctccggccactgtaactcgcatcatcgctcaagccactctcttttcatcctcaggtggctcgacctcacgtcgacgtcttgcgctcaccggctcgacgtcctctccgcctcgaccaaatcacccgacacgcgccacctgttcatctcatctcgcgaccgtgcgctcgcagccggagctgcggaagcactcgacagcgagccgcacgacctcgtgtggattcagacgagcgtctttctccactatcagttcctccggcggttcgcgctcgagatgcccgcgagctggcaactcgaccggcggtgcgtttctcatacccacacaagccagttctgctgacgaagagttttctttccgctcttcgtcccgacaggcacgcgttggacatgctgcgtgcgatcgcgacctcgccgaaccgggcccacctcgaggagctcaagtgcagcccgtccctcccggtcctcgacccggttcgtgctccgccgacggtcgacgagcgcggcatcgcccttgcccctgctcggctggtcatcccggccggctcggccctcctcctcttcacgctccacgccctcacaacggtcgagctcgagtgcgccttcaccgacgtccacatttccttcctcgctaagtcgtggccgaacctgcggtcgttagttctccgctcgccgccgctcgtctacctcgaccgggccgaggcgcagacgacgggcgcgcactttgtcccccagccgacgatccgcgccctgacggtcctcgctacgcgctgccttcagctcgagcacctcaagatggacctccagcccccgccgccggctgcacttgtcagcgtccagacagctgtcaccttttgccccatctttggccctcggctcgcccggctctcaatcactggctggacggcaattgacatcgaccggaagcacgtcagcttcctcgctatcttcgttgctcgcgccgtgcctccgacctgcgtgctcgacctgcccaccgtcgctctcggcggcctcgtcgacctgttcgcccctccgacgcgccgccatgagacgcagtggctgacggccaccctcaagcagctggcgaagcacccgtcgatccggcatctcgcttggccgggcacccagccctctcgtccggcggcctagtcatcctcggttgtttctcaaagaggcaccgctccgtgccctaccccgcttcagatcctgcccggccggtcgagcagactctgtccaccttctcctactgagcgccaccttcacgacggcgacacctcccccgcaccacccctgcctgctgccgacccccctttcgacgatgatgacatcatggccctactagtctcgaggattgctgcgtcagaagtgtcgacgacaagggtcgtcgtggctgagcttaggagagtgcactttgtcggttcggcgacggccgccgtcgctgaaccgtgctgcgcgcgcactgtcgaatcctgcagagctgctggctggcgactggctcacagtcctcgttcttagacagctctacttgactgaatactggttttcattcctccgagacttccgccctcgacgatcatcctccagctgctttgaaggatcggtggctggaggctcttttagctcgtcggagccgcaccgcaggtcgacgcgccgacgtgcctcgcctttcgacgcgcctcctcccctcttcgtccctccaacgagatcccttgctcttccagacctgacgcctctaagcttcaacgccgctcagcatcgcactcgtgcttcagcctgcaggcagtcctcacccgccgctcccaggttagccggcgggcttgctgatcccaactacccggcccctccccgagctcgaaaggctaccggacatcagagctcgaaaccttgcgagagagaaagcgcgccccaaggcaccggtcccgacgccacgccttctcctctctagcaggccgcccggtcgaggctcttgccagcctggacgcgatggactgcgtcgccggccatgcccgccatgccggccgcggtccctccctcgctcggcttggcgtagctctcctccctctcacctcgaggcttcaccatcggaccagaaactgtctcccttacatctcggtcccgcttcgagtcgctcttctgcggacgtcggcccgcccctgcccttcccaggagctttcgccgtcgtagctcgaccgcagccctcgaagcagcagcgtcacctctcccagtcctccccccaccttctagcgccaccagccttcctctccatcaccactcgccattcgctcgacgacctcaggccggccaacaggacgtccgaagagccgcagtatgcccgcagctcgcggtcggtctccgtcgcgaacggcggcggccagcgcgtcgacctcgtccgcctcgccgagcgacgacaacagcggcgatgctagcaactcctccggcctcggcctccgcttcgacgacgaggacggctggtcgaagtcagctcttgggcttcacaacctcatcgaggacgatccttatggtacgcgtcacctcgagtcgcccgttgccgtcgtctcgtggtcgttctggcgggacgagccactcgtcgcaacagcggccgctcctcggccggtccgccactcgatcgactacggtcgctcgtcaggctcagccgtcggcggtccttcagcctcgctcccgtcgacgcttgccttccacgctttccatcggacgccgacgaccgtctggcaggcgtaccggccggccgtcgtcgacgaacgagcgccgacatgctcactgggcggactcggctcggccactcgcctcgcctcatcgccgtcgcgttcgacatacacgcagtccccgctgtcgacgccgttccgtggccgcttcctctcgctcgacctcgcgcccgacgaggattccgaagattccgaggacgaggagccctctcccatgcctgctcccatcgaatacatcgtccggccgccagcatcctccccgatggttcgctcgccgccagtcgtctacaatctccgtcacgaaagatcggcctcatcgctgtcgtctcagccagacacgccctacgccttcaactcgatttccgacgaggcgtcgcagtcggtccgatggaccaagaagggttcgacgaacaaggccaaggcgccccctgccagcaaggccgtcaccggccgtgtacccagctcgctcaggacgcaggcttcaaccggcttcatcaagacgtacaagaatggtaaggcgatgcactcgtgcgagccatgccgcaaagctcggcacaaggtgcgaccaggcgatcagagctcgcccttgcacaccccctcgctgacccagctgcatgtcaaccgcaccagtgcatcggcgcccacccgcccctggccggccaagcgggcgtctctgagcagccctgccagcgctgcgcggcccgcaacgcagcttgcgtctttgaggtcctccagacgcgtggctcgagcaagcgctacaaggcggttaacgctggcctcaagacgggcgcgtcgtcggtgggcacctcgtttacggcgtcgcggcggtcgattccccctctcacggatgtcttttcggcgccgagctcctctcgcctgcgccgctcgcagcctgtgatcaacaaacgcaggtcgacgggcgagtcagacaacgaaagcgatgccgatgccgagtacgacccgttcggctcgacgcgcccggcctcgaaccgcaaggtccgacacaccttcatcccggacgtcatcggcgccggctcctctgcgctggtctcgggctcccgggcctcctcttcggcctcgtcaatgcgctcggaccgttcacctcgttccgccggcgacccgatcgactcgggtctcatgccggccacctacgatggcctgccgcgcgctgtgtcgctcacaagtagctcgagcgacacggacgacctgccgctctcgccgccctcgcaccaggggccgctcccgatccggttcgacagcacgagcggccactgctacccgacctcgcaaggcgccctgcccgtcggcatcaacacggatgcgatcggcgcctcgcacgtcagccgtcagtcgtcgtcggacggaagcgactcgctccgctcgctctcggcctttgtcgacaagtcggcggctcgctcgcgcgagccctcgtcgtcgagcacaaccgtcggctccgaaggctctagcgacgagccgcaggacaaccagccgttcgtcgctccgccgtcttcgctttggacctggttcaaccggcaggaagcctcgcctgccatacacgcgccctgaacggctcatccgcctcgcttctcgctcgccctatcacgactctccctctctctctttcgaaaatcggcctgtcatccggatcctcctctgcttttactccaacgcggagagcgctgcttcatggatgtcgcttgcactctcgctgcgtcgtacgcgatcagcgctgactccgccgtaagggcccctcaaggacctggcatgttccgaagagctagctggatgcgaggcgccgactcgatgctcgtcgaacgcggtgatcgcaagaaggcggcatggtcaggcgtctgaaagaagagaaaacggtcagctcccttttgcaaagcgtcacagaggtggacaggaaccgcaccggcgtcgcaagtgcgcaggctcgctgtcgcaagtcgagagtcgcaatgaccaggaccagggtgttggccggccaatcggactcgaatgccgtcattagtcctgcggccgtacttgacgagaggacccatactgccggcgtcgctcgaggtttatggcgaggcgttctcgacaaccgcctcggtgcggccgtcctccgtgacggcagagggctcttccggtgacgatcgcctcagcaggctgatccaccggtccctcgcttgtccgtccctcccgagctcgacgacgccgctgacctctgcccgcgcgacatactcgcgccaatccgccgctccgacacgccgcatcgcctcctccgcctcgcccgaacgcgagagcgcgagcaggaccgcgtcttgaatatgaggcctgttgagaacggctgcgaggggcgcaaagagttcggcagggagaggctcgagaggtgggttgcgggtgaaggacgttggtggccgccgaagggtggaagtgagctgtcggaaaggagcaagtacatttggcgaagacaaggcgggagctacgacttccgcgtcgacggcaggggacgccgcaggagtgtccaacggctcggccgaagggactgctgaggagacaaaggaggtcgactggccagactctgcctcactctcgtccgacatgaccgccgcagcttcccgagctccaaggacggctgcgagcccggggctaacgatcgtgccgctggcgtcaagccctgctgcgctgctgctaatgctggccatcgccgccgtcgccgcccgcatggccttcttgcgccgctccttttcccagcgccagaaggcctttggaatccgttccgatgctggccagaccggtgcaccgctgcccgaatggccaccgcgcaagttcgaattcgtcggcggcagtagtcgcaggcggcttgccttactcgcaggcatgccggccgcaaggatttgctcttcggcggtcgccgtcgcaagatcgacgtacgagaagtcggagacgagcacctggagcgtcggcgtgagcgtcatccactcgtaggcatttgccgggcccgcgccgaggatgacgagtccggctgcctgggccgcggcaaagtactggccgtgcgagctacagccggcgcgggtgaaagcggccgggtcgcgcgagaggattgcccgagagacggagacttgcgggacgagcggccggcgaaactcggggagggtgagggcagcgatgagtgggtggaagagtgtctgatcggtcggggccggccggaagttggttggcacgtgctgagttgagccgtcgacctcgataggctgcgcggcctcttctttgagggcgaagaaggacctaagaaactggcggcatcgagcggccatggtcgggggcggggtcggctttaatggaagcagtggctttggcaactggcggaaagagtatcgaccagacaccagggtcagtctgagctcgaaggcatgttcggactgagccatgccacacctggctcagcagatggctccggcccataatgtcctcgaagccaaagacgacgtcggccgcaacccggagtgccggctttgtctgccgctgaccctcaatcaggacgacctgatagtgccggtttcgaagcatgttgagcatcggagcaaagtcgtgatctgagaggcgggcgtacaaaggcatgagttgggaggaatgaaggcagcaggagcgtcagcttcggctgtcggagtctgagacggagggcgtgcggcagagacgtaccagagctcatgaggacgactgtcgccggcggcggatggtcgagcgcaaaagcggcgagatccgtcatgatgtgtcgatcagagacttctttgtcgccactgtgcggacagtctggcaggggtttacatcagagggcgagaggtcagtcctacggctgcaggccttggtctgctgcgcgccgcccgagaggaagaccagtagggacgaggacgcaccgcggacctcgatgcctgaacgcgaggccttctcgaggaagcccgacagatggcggcttgcactcttggagtctacgacgagacgggtgcgggagcaggtcagcctgtcgagattcgagcacaagctgagcgcgccgtcgccgtcgccgttgccgtcgtcgagcgccggtgctgaggagaccaaccttggtagagcttgatgaagctgaccggtccaaaaggacgtgtcaggttcctgagtgacatgacgagcttggcggccgagacccatcgtggcggcgtgcagttctctacagaagggcagggtagagccgtcagggcgaggttcgtcgctgttcgaccgggcgggctgctcgtcagaagccggcaggcacgtcggccgtaccaatgtcgaagaagacgccgaccgctcccgatcgcgcggccggtggtctgcttgagcgcaggagccggccgagcatgcacgttcgtatgtgatcttgctgctctggagaagggagcgagacggacgcatagggacaagggtgaggccgcggtcgtcgctcgcagctgcagttctcgcccgctcgcagatgcgagttggcaaccgcgccggagcgtgcaaaactccgccctccgaaattccagccgcccctcactctcgaccaccatcagccttccctcctttccctctccgcgggacccacctcgctctcgatcatggtctagcagccgtccgcgcaatgggcactcaagcaccctccgcacctccacctatctcggcgcctgcgctcgcgctcgccgtcggtcttcctagggcctttgcccaggccggcgcgccctcgctcgccgccctccatctcggtcgacttcggctcgcaaacgagatccccggctcgacgacgacggccctctgctgtccggcctgctcggcacccaccggactgtcgaccaacgtccgtctcgtccggtcgcgccgtgccaaagcccgcgcgaagaagaccaaagcccacgtagtcaactcgcgcgtgcttcgctgcaacgtctgcgcgtttgaggtccgcgagccagggagtgaccggacgacggtcgacgcctttccttcggcccgcaaggctgcaaggaccgctgccgccgccgccctggccccgccgccgccggttgtcgccccgacggcccatcaagggtctgcctcgttcttgcggccatcctcgactctggcttccgctggccgtcccccgccttcgcctgcgccctcgtcggtccgcctgtcgcccctttcgtcggctcgatcgtcgcccgctccctcggcctgcgcttctccggccctagctccggccgcgccgccatccaaggctggctgtcccgcgccggccagtatcgcggcccctccgccggcagcctcctcggcccgcaagaagaagcctcagacgacgcttcagaagatgctcgcgctcaacaaggcccgcgaggaggccgacgctgcggcaaagaagtcgagcggcggcctgctcgactggatgtgagacgccttcgccttcgatcagcccatgcaggttcgtcctcattccttccgcccaccccaccaccaaccctctcctccgagggagagcatgcgtgatgagacttatcagctggcaccagaccgaaggggtgtatgccccgtctgaggttaacctctttgcatgggctggaatacgctctggcccctgaaacacgctctccctcactttccttcctacctgcctcgcttcctcactcaggcttctcacctcctgcctgtgacctacgctgacgctgtccgaccgttctcgcttctccaggccgcttgaacggcgccgtttctcaatgtcatgctgcctcttcttttattttacttgcccaacgaaagactccttcggacacacgatcgttaagctttagagggtgccaggggcggagtaatcggagagaacgactatcgttctgtcggcgcaaggacagcctgccaacgagggccgaatcagtgggcgtcggtcgcatgtcggccgtcgagcgttcgcaggtcggaggggtgtttggctccacgacctcgtgaggcaggcggggcaagagacccggccgacatcgagcgctgccctctcttcccccaacctgctccattatccctgcctgcccgactgctacagtgcctgtcttggtcgcaggatgatcctcatcgaggacgtcaagactcctccgccgccatcggccgacccgtcctcaccctcgcggctcgaagcccagccaggccggtcgtcccgagctagggtcgacaccgagcccttgctcggccacgccgctcggtcgaccacctcctacctctttggcagcggtcgtaggccagctagcgtccggtcgctctctccacctcccgaatacaccccgcccccgccggcaggcgaagagacgtcgactaaggcgggccggagcgcccggggccgcttcctgcgcgcgctggtcgccgccgtcgccctctatcttgtcgccgcgctcgtcctcggtctcgtgctcaaagacgccggcggcctttctgatctccccgaggaggagaatgcgccggctgtgccgagtccgacgtcgggccctatcgcccggccgaaaccagatttcccaaagcccccacacggcccgaagcagccgttgaaccggtgagtgtgccctgctggtcgagacgagccctcggtctctaattgaacgactacctggctctggtctgctgcagttgggactcagcgtactacctcccaccgcttgagcacggtcatatcgtcggatgtgcgcctgtctcgccctcgatgacagtcgtctacagccttgccttgccgatgccgacgctcgccctccgggtcggtaccgttcgcccgcgacgtctcggccggccgcttgacgaggtcgaggccgacatgccgactgagcccgaggtcgatgttcgcgtcttgccctggctcgaagacgacgacggcgctcggtggggcccttggagcgagggcgaggtcaaggtgattgtcgagacggccggtgggaaggacgcatcgagggccgcaggcctgctgctccaagtttgtcagctgggcgacacgctgcagtccgctgtcggcatctacgtacgtcctcgaggcttggctgctcgtacttgtcggccgcgattttgacttgctaccgcttgtgcgcgacacagtcggcctcgagcacgcccgcccacctcgtcgtgacgatcctcgtgccaatgtcagagtacaccgatcgcttcatttcgagcctcgtcgtcgacggcgtccttggctcgctctttgttggcgacatgctcatgacgaaggatcttgagctgccagcgttcggccgcgaaccgggctggtcggcgctcagcgtccgcatgttgcgaggcgaggtcttgatcaaggtgaatgtcgtctctcgtgttaagaggtgctggtcatctgagctgactgaggatcacattgacagggcctcgacgtcgacgacttctcgatcattggccaagaccagaccgacatcatggtcggcgcgatgcgcgtcagccggagtctcgaggtctcgactggctccgagggggggggacgggtcgtctttggcagcctcttgattgagccagattgcgtctgccggatcgactcgcagaggtgcgtgcgcctgctgagtcttcgagctctcgtcctgctcctaactgacctccctcacccctttcgccagcggtgccgtcgtcgctaacgtctcgcttgtctcctcgcacatgccgccgcttccagcgtccgcgttgtttaacggtcaacttccgggtttgccgtccaacggcggacgacccaagccaggcttcccgacgcagcctaagctgccaatcctccacccggtcaggttcacggcgacctcagtcctgggcaacgtgacgctccgcgtcctcgatcacctgccacacatcccgctccaggcgtcgctccgctcggccggctcgatcgacgttcggctgacgcctaacttccagggctacttctcgttgacatcgcctcaccgcgggctcgtccggacgctcttcccgtcgtcgtccggcagcggcgcgtcgacgatccccgacccgtttggcctctcgcgcaagcttgtcgtacacctcgcccgctttggcaagggcgtcgtcgaggcctcgctcggctggggctgggccggcaaacccgacctcgaaggtcgcatcaccgcctcgtccgagcagggcgcggtcagcgtcgagatgttgaccgcctaggcgttctccgaccaaacacctctccgtacttatcttgactctctcgcccttttggctctcacttacctccaggatgttgtaccctcgcccgaccgcctctcgccttcctgttgccttagtctggttctcccgttgtacccgtctgccttccgcgtctcgcgcgcccatacgaccctgtcgatgctcacaagactttggcatcaagcagcgcctgctattgacgagtgagggaggaagcggaccgacgggcggtcgtactttggccgtggttgatgatgatgcgcgttccggctgggccgatgcgccgcgcgtgcgggccgccgcttcgtcgctccttcacccctcgatcctcccctttcaccttctcgctctacgctctccttgtactcggcctaacgacgcctgaagcttgccgcccgcacaagctagccaacctccgcaccatcctccgccgccacagccatgtcggacgatgcgctctttgaggagctcaaggttcggccgcgcacgggcttcccgttcagccctcctctcgtcgctccgaactctcgcgctgacatcgacctgctcgtctgcaggacgagtttcacccaccactgtcgccaaccgtgcgttgcaagagagcatgttgccgtccgagacgatggattgacggatggccttcctttgcagctgattgcgacgctcctgctcgactacgatccagaggataagggctcgctcggtctcatcaagacgtcgctccgcctgctcgccgacgagacgcccgaagccgagccctacttctatccgtcgtcggacgaaggcgacgatccggtcgactcggacgacgtccggcggatgcttgcgagctggtcgctcgagagttcgacaacgacgacatcggcctcgggcggcgcagcagccgacagctggccctctggaagcggcagcaactcgtcagacagcgcgagcctcaacggtgtgacgagctcgcgcgaggacaatctcgagttcctcaagatgctcttcccttacgcgtcagtccgagaatgttggtcgccggctgtatgcatctctcgtgcttatgctcgcctcgcctccttctccgcccgtgcgcagcctgatcgagagcctcgagcaggcgctcgacgactgtcctgggagcgacatgacgcctgtcgtcgagcagatcctttcgatggaggccatccgtgaggctgaggaagccgggggctgggacgacgacccgtcggccgcggccatggccgaggtttgggcgagcctctcgcaagcggagcgtgaccagctctgggagcacgggcccgatgaggacgacgccaatgacagggctgccgcagaagccaagttgggcgaccacctgtgggagcacggcctctctgacgaccttgtcgagtcccagcctatgtcgcgggcgtcgtccgtcacgtccaagaagtcaaaggctaagagcaaaaaggccggcgtccagaagacgttggtcggcggtcttccaaccggcgtcctctcccgacctgcgccgtcccccgcctcatcgacccgcagcctgggcggcgctgcgatggccaagaccaactcaaagaccggcagcaatgcctgggtcgccatgagctcgatcgcgacctcgctcgccggcatcctcggcccatcgaccggtaaggcctcggcgagccacttcaacgcctaccttcactcctcagcccaggcgtcgacctacgcaaacgtcgtcgcctcgctcatcgcgctcgatcggccaaagccggcgctcgaggccgactacctcatgatgctcgtcttttccgacacgacgcccgacaagcggcaggtcgaggtgctcggtgtcgtctggactgcctcggccggcgaggtcgacaccgcgctcaacctctgggccctgctcgaaaacgtcaagcagcgctcaggcgaccctgggccgctcaacgacgggctcttcatcccttcagctgtcccgactaagatggccgtgaagccgtcgccgcttcgcacgccaccgacctcggcaccttcttcacccgtccctcgaaacaagcctctcgcgcgtcccgtcgtctcgacccacctccatccaacctcgcgcaacctgccgagtcacccggcaccgactctggtccccttacctccgtcaccggtcgttcccgccgccaagctcagaggcggcttccagattcctggcggtcgcgcccaacggaccaagtttgctcccagcggcaagccaatcgtcttccatccgctggccgacagcatcccggcgtacaaaggcgggggcgtcgccgtcgcgcgccagctcgaagccaacgcgacgacgagcaagaagggcggctggctggcgctcaaggagcgcgaggcgagggagcgtcggctgcgtgacgaggtgcgtctcctcgctctcttcggagttatgcgcatcccccgacctccggctgatccctgctcgttccttcttgtcttcaggcgctgcgcagtgcatcgcgctacttttcaagcggaactgcgaccaatttcggcaagacgattgccgcgcattacgccgagcaggtgcggccgctgcccctatcctcttcatctcctctgcattgcccgctaacgtcgcgcgctcattcaccacaggctcgcaaacacaacgaggcgtccagagagctcggtcttgaagccgccaaggagcagatctactcgtcgacgaggtaggccgcttgccgtctcgactgccattagagcagaccccgttgacttcccaatgctcgccgctgcaggacgacggcgaccgggatcgacctgcatggtctcaacctctaccaagcgacgcacgtcgtcgacgagagcgtcgaagcctggtgggaggacacgagtctccgtgtgtcccctgctccccctctccgcatccgcaattcgcctgacccacgctgacacgctccctccccatcgctcgccaggctcgagccccttcaccatcatcaccggccgcggactccattctgaccaggcccgggccgtcctccggccggcgatcagcaagcggctcaagacccagggctggcgcgtcagcgagggatccgagggcgcgctcaaggtctttggacgcgtgtagccgagcgtctcgattcttcagattgtaacattcttctggagcaagcagaaaggccttgttgtagttattgagattgatcgcatgagtggcgaggacgatcagaaggagcaagtcgaacctgcgccggttggccctgatctcgcgaagtagaacgcaatcaacgaccattgcttagcttctcgcccaagtcgattaggccatagagcgccccacaacccgccctgaccgccttcagtaaagtcgcccgccgaagcacaaaagctggcataacatccgcattgcgcctcctcaaacgaacgaggcgacaaagtgggcgaggacgacgccgacgccggcgacgagcagacccgtcatcttctcgagcaccgtgtggaaccagatggacgtctgggctggcggtgcgggaacaaggagcaaaggacagggagtcagctgcgcagttcatgacgcgcttggccagcaaggagacgaggacggactcaggatgaagacccagagggcgacgaggaccgctcccgcaagtgcgacgtatgtcctgacgctcgcccggcgcaagtcgtaacccgaacgatggagctgggcgagcgttggatagatctcgccaaagaggaggacggccgagagcgtcaggaggaacacatggcccgagacgtcgtgcccgcccgaccagcgcggatggacggccgaccaccactcagacagcgtctcgctcctgaagtcgcccgagacgccggatccatgcagcgggggcgcgattgcctttgagaggctcgccgcgagcccggccgacgacggcgcgcggatgtggcagaactcgctcgggaccgagacgagcgcgccgtctcctaccgcgacgccgagcgagcagtcgacctcacccgagacgcacgccgaccgcgggacgaggacgctgcattcgccgccggtgtagatgagcgttcgttcgaagagagagggcccgacggcccagacggtgaggagcgcccagtaagcggttgctgtcgcatagcgcgtgagcgaacggaggcgcgagctcgttgctgatacgcgcgaggggtggaggagggcgtgcaggatgaatggaagcgtcgtccaggcccaggccttctttgcaaacctgcgacaagaagggcgcgatggtcagcaagaggttagcggcggcagaggagggaggtcggagatgcctccttccatctcgggcgggctggccgacctcccttcaacccaaggcatacagcccgggagcttcctgatcggacgtaccagcggttgaataggttgcccttctgtgcaaagtagcctcggccatcaacgccctcgacccaagcggtcggcggcagggcgtcgccctcgagcgccgcgcgggccgagctcggcgacggtgccggctgggaggcgaggtcatagtgggccgagtagagggtgaggccgaggacgacgaggatgatgaggagaagcagccggcgctgcggagctgggaggagggacggcgacatggcgggcagatgggggttggagggttgagggctgaaggtcggacggaggacgagtgacgtcgtcgggtcggccgcagcagcagccagcggcgccaatagtacgttcgacaggcacggcagcacgtcgtctgatcgaccccttcccatgcacgcagggacagtagcgagagccatctagtacaacctgggagatttctttttctggctctatatgtaagaagccgggtgacggaagggaggggggcaaaggaaagatgcacggggaggggatgggtgaggcgaagtatgcggagggagaaagatcgtggagggggggcgtcgggccaggcctgagctagtgatggaggagcgggagcgagatagtgaagacggctactgccgaccattgaccttcgccccgctcggcgtcgtcgctcctgccgaagcgggcggtgtcagggtcaacccctcgcgctcctcgagcgtctgctcaaacgcatcctcctcgtcctcctcgcgccacttgcgactccgctcgaccgcccgcttccagcccttccattttttctcgcgctcgcactcgccgagcaccggcgagaaggtcgtcatcgcccgggcgttgactttgcggagcgtgtgcgggtccgagagcgaccagccgaagagcccgagggccgagccggcgagtagggccgcaccgagcgcggtcgacctggcacgggggatttgcggtcagcaatagaccagggcggacggttggtaggaggcgtcggacacgcactcgcgcatctgcggccgctcgacagtaaagccgccgatgtcggcctggatctgcatcgcatggtcgctgttcgtgacgccgccgtcgaccttgagcttgaggagcggaatgtctgagtcggcccgcatcgcctcgaggatcgcccgggtctgcgacgagggacaaaaggtcggggagggtcagcctctgagcgaccatgagcaagagagcgcgagatagacctgaaacgagacggcctcgagcgtcgcccggcagatgtgggcccggttcgtatacgccgagatgccgatgaggaggccgcccgcctccgagtcccagtacggggcgagcaggcccgagaaagccgtgacaaagtagacgccgccggtgtcggagacagttgagacaaggtcgtcaatgtcggacgacttctgaatgatctgcatctggtcgcggagcctgtcggcgtgagggagatcgtcagcgagacgcagtcgtgagagggggctggccgaggacggaccacttgatggacgagcccgcgacaccgacgctaccctcgagcgcatagacgggcttggcgtcaggcccggcctggtaggcaacctgcgaatggcgggagcagcgacaaggtcagcgccgaggtcgcccctggccagagagaggggcggaaacagacggtcgatatcaggccgtgtcggctgcggacaatgtcgttccctgagcaggcaacgatgaaggcgccctgtgtcccatgcagtaaaggaggtggtcagcctcgagcgccaggttttgaaagtgggaagggtcagaacgaacagtgccaaacgttgcctttgccatgccgagcgtcaagcatttctggccgacgagcgccgcctgctggtcgcctgcgatcccgctgatgggcacgccctcgagcgggccctcaaagcacgtgccgtagacctcgctcgagctccggatctcgggcagcatgctctccttgaagccaaaccaagcgagcagcgacggactccacgagacggtctcgagcgtgcagaggagcgtgcgcgaggcgttggagacgtcgatcacgtgcaggccgccttggtcgggtccgcccgtcaggttgtagacgagccacgagtcgaccgtgccaaagcagagccggtcggcggcctcggcctcgcggatctccgaatgagtgtcgatcatccagcgggccttgatggccgaaaagtaggtcgagagcgggaggccagtcctgcgagaagggaatgcaagcggtcagcgacccaaaggacgacgagaaagcagaagctcgcccgggacgcacagggccttgaggccgtcagtgcccatcaggaagcgggcggtgcgtgtgccgcctttgtcgtcccggacctcgcgctcgacacaggtcccctctgcaaagcccttggcttccgaaaagtcgagctcggcgtccttcccgcggagctcgatgccgacatcgtcgagcttgcgctggtaggcatggacctcggacgccgtccggctgtcgtcccagacgatggcgttgcagaagggctcgcccgtctgccggtcccaggcgagcgtcgtctcgcgctgattggtgatgccgatgcacttgacgtcggaccgcgagtagccgagctcctccatctcctcgatcgcgccgtcaatgcagtcattgaccgagtccatcaggtcgatcgggtcgtgctcgtgccatctgcgggcgggcgagaggaaggtcagcctgcgcgcaaccgcacgccagagttggaaaggaggcgcaccctggctccgggtagtgctggaccgtctcgacctgataggacgagactatgttggcaaattggtcaaagacgatgaagcgcgacgaggtcgtgccgacgtcgagcgctctgtcgttggccagaccggggggaagagggcgagggacgagatgagcggtgcgggagggcaggaccgggagtcggaagggggcgcgcgagtcgaggagcgagcgaatgagcacgggcgacgagtggcaggagacgagagcagatacgagagcaaaataaggtcagccaagagcatgaggcggccagacaggtggtaggagcgccggatgacgctagccggagcgcttgcgctggccgacggcgtccgacgacgccccgactggcctcgagcaaaacgctctcgagcaaaacactcaaagcaagagagctggactgacccgataaaagaagatccttctgctccgttcaaacgcacgagagagcgagagtgggcaaagaggaaatgaagagaggagagccggagaaaggcgcaacgagcgggaggtgacgcgccgggaaaaagggcggagagcgggagggaagaagcaacggcaagggaggtcagctcgtgaagcgtcgacaagagacaaggtcgcgaaggcaagctcgtgcaacgtctcttccgcctctccttaaggcaaggtgaagagagctcggttggtcggacgcacctcctccgggcgagggcggtcggctcggcagcctgctcggagggagcgagccggccgtcgggctgccgggcgcgctactgctgctgctactcgcgccggtgccgccgttgggcgtcggcggatgcgagctgacgggcgtgaaggaggtcaaggggttcatccggtgcgggtttgtcgtcgggaggagggtggtgaaggtcgggcgtagggcgagagatgccagccaggccagctctgctgctctgctctgcctgctgtcccggtccgggccggcgcgcagccccgcagggacgaaaggcactccacaagggcggctgagccccgtaagtcttgcccggacccccttcctgctggcctctgctctagcaagtcgagctggtagagacgatagcatggtccctttcggccaatgctcgagcaagtgcgacaagaaaggaggaaaaccgacggccatgctctctcgctcagcgcgaccccgtcggctccggtcaaaagtcttagtggcggaagtcgccggcccggccaccaacgacgccgccgtcgcgcctgtcgtccctcggtcgacggtcgccccagcctcctcctcctcctcctcctcctcctcctcctccatgtcgaccaccgtccgaccttcggcggtctggacttcgactcctgctccgccgtctcgagggagcgggagcctcgcgccggtcgccgctcggccgagggtcacggtcgcgatcacggtcgcgcgagccaccgccgccgccgccccggtgtgcgaggtcccggtcgtcaaagacgaggcccatctcgccccttcctcccctctgctcgaagcctcccctccctctgcctcctcctcctcttccacctcggccccctcgaccgccaccacctccacggccgtcagaggcctggacgcggagcgcagcgttcccccacgagccgccgagcttcgagaccgactgcgaaaagtcgacccagatgcgccggtcgtcgacgaggacgttctgcattttgaagtaggcctgcgcatcgatcaaaagcggggacgtcaggaagttggtacggtgatggcaagtcgtcgaaggggcgcacctgctcggcgtcctcctgccggtcaaactcgatgaacgcatattgaagcgagtcgcccgtcttcttgtcgcgaatcacctcgcagctcaagattttgccaaagcgcgaaaatatgagctcgaggtcctcgtcctgcgtgacggcgttaagcttgcagacaaagagaatgttctcgggcggccggacgttggcgaacggcaggtcgccgatcatctcgagagtcaacgccgaggacgaggcggcagtcttacgggcctgctcagcgagctcggaggctgggagcggggcggagagatcgtcggcgtccgagaggcggagggaggggagtgtgtcggggatccgggtcggcgaggcgggaggaacgatgaggccttccggatcggggaaagggtcgtctaaaaagttgagataggactcgtcagtgcacggttacaggcgtcgaggcaagaatggactgaccaaggacgatgacatgccggatccgaatgtccatcagcggcctcccctcgccgtcgacaaacgcctcattcatcttgcgcaggacgtcgagcccttcgacgacatggccaaagacagcgtgcttcccgtcaaggtactcgatcggcccgtcgttgagcgtgatgaagaactgggagccgcatgttcgcggctcagagggcgagagcgccatcgagacggtcccgagcgcgctgtgcttgagcggctggcggccgagcttcggcatgaagtaacgcggggtggcggcctgctgctgttgagaggcaaggaaggatatgatcgactcgccccctgtgcctgtcgccgtcgggtcgccggtctgggcgatgaagtccttcgagactgaagaggcggcgggagtggtggaggcgaaggagggaggcgcagcgaggcgaggcgagagaggaggcaaggtcagcctcgagacttcaggacgtagcttctcgtccagacagaccattgaagaaggcattcaggttgtagtagtagaccttgcagagctgctcgcagagaggtcggctcgaacagtcagtcgtcgagtgaattggcgtcgagcagctcccagacgcccgagagacggaccttgaggaagtttgagcagagctctgggcaggcgtcgacctcgagatcgatgacgaggtcgccgagactcgtctcgaagaggacgctcatcctgggcgaggaaacctgctgaggaaggaggtgactgtcggtcgggtgctgaggtcgaggtggttgcttcgaacttcgagctgctgcacctccagacagccatccccaactgagccagcaagcccccgaccctctcgcctgccgacgtcaagccagcactggacccgtctcctaaaagctctcgctcgctcgctcgcttgaccatgtcacctcctctgggaaagcgcggtgctccgtccgtccccttctctggcggcggcatgttccgcgcaccgcgcaagccgaggctgacattcgcggatcgtctctgcctctgcttccttccaggatccaggaggacgcctcgcagctgatcctcggcgagggtacgttctgtgtcatctccatcggctgccactcgtcatgctcgagccatggcgggcttcgaacgacgcccgcagcggtccctccttgctccgaagctgacctgactctcgtgtttctccgtcctttccgctcgtcgctcctgccgcccgctcccagaatttgacgacgccgactgcatgatggtctctgaggttcagtacctcctcaacgacgccagggcccagaagatcggcgacgacgagtcggcgtgcgtccctgtcccctcatccgccctcccttgactcgctcgctgactaccggtgtcctcggacgaccggctgcctgtgacagggtgtaccagaagacgcgctcgcacatcgacgtgtttgcaaaggcctcgctggaccaagtccgaacgatccgaaagtgcgtcacttcacgcctctcttgccttacgtttcttcctgacatgagcatctccgcatcccctcttctccaactcggcccattcatcgctctccaatgcgccgcacctgtccgcggttatgtgtctctagtatcctcacgcgcgagcccgagctgttcaagaacttcgaggtcgcccagctcggcaacatccttcccgacacggccgagatggcaaagtcgctcatcccatcgtacgtccgactcctgctgactcctgccggaatgatctctagacgacgctgactttctgccggtgtgcgcacttcacttcgcccgcagactgtcgagggtcgacgacgagaagctgcagggcctgttggacgagctggcggtcgctcgccgggccatcggccaggagtgaagggagagggcgtttggggatgacaatgttgtaccgaccgatcctgcttgatcttgacgctggcgatggtagtgtcggtgaggagtggaggcgactgtccggttcccaggcgtttataaacaccgcgtgtcagcagcaagagaggcgtcgtccgtccctccgagctctcagcccatcctgcctgttcgttaccaccaccaccaccaccaccaccgcccaccacactcaagccacaatccagaccgttcagccttatcttaaactcccttagcgtccgtccagactttctagcccggtcggcaccgtgcagcatccaccacattcaagccttcggaggagaccggaacctcttgctgaccgacccaacctctctcctccctcagccctcgcagcatgtccgccctctctgccacctctgcgcccgcttcagcagcggccaaggtcgtcgaccttaaggtcttctcgagcccgctttgtcccttttgcctgtgcgtgcctgttccctcgatctagctagttgaccccggtcggcagccgggtagccggcgcacaaggggggtggcagagcctctgtctctctccccccgcctcccgagctgctccgacgtcgactgctcgagctcccttgctgacgctcctcttgcactgtccgctcccgtacccgtcgatccgcacgaatcgctaccagcatgtgcgtctaccccggccgcaccgacccttgcttgcacgccgtcctcaccggagtcgttgagctgacgacccctccctccttctttcgatgcaacagcggcctgcgtaacatccagaaggcccaggcttcgatgcccgacgtcaagttccgcatccagtccgtccgcctgtcttggccccgtccgatctccagctgacgactaccccggtcggccgcgcaccaggttcctccccttcctgctcgacccgaccctcccctcgacgccggtcaacaagcgcgagcgctacgagcaaaagtttggcggcgcggccaaggttgcccagatggagcgcgtcatggtcgacaaggccaagcagtgcggcatcaacctgagttatggcgggatgatcagccagccgacagacgcgctgaggttgctcgcgcttgcttgggagatggggggcgaggagcgtcagttggacctgatggagaggctatttaaggtgaggcctctcgaccttccactctagttcgctacgtcacggccgtctccttcaggccggcaaccgctgatacgccctctttgccttctccaccgcagggctactttgagcaggagaaggactacggcgacaagaccgagttccttgtgccccaggccgtcgacgcaaaggtcttctcctcggcgtccgaggtgcgttctctcctgacccgtggccgaggtcgaccagagagactgaccggtcacgcccgatctctgccaggccgaggctttcctcgcatcgaccgcgttttcagcagaggtcgaggccggttaccggaaggccgcagggctcggcatctctggcgttcccttgtgcgtctgcctctggtctcggtgcgcatgtcccgtcactgacgccgacccttcctcactccctcctgcttgcagtaccgtcatcaacgacaagtatgccgttgagggcgctcagccagccgaggcgtttactgagatctttgccaaggtcgcgcagggcgtcgctccggcgtgactcggcgagcccgcagcctcagcagcagacccactgtatggacttgctttcgtctgatgccgtgcgcgaggtgagggaagcttaaagaggactcgaatgggacgctacaggggggcgtatggcggggccaagaggcgcccgagggggggggccaacaacagggatgtatcagagacggggctacggggaacagaagggggtgtacagctgggctcgagagcagctcaaggaggttgagtggaagaagactgggtcggccggggagagagggcaacgacgaggaggagaagggagggtcgacgttctgctcgggccgagtgcgagggggcacatgtcgagactcccagcgaccgcctcagcttccctctgccgttgtgtcggccgtcgttttggtcggccatgactcggccgcctttgcgcgcatctcgcgctggagctccccactctttagaaagagcatctcgagccctctccgagcatcgcgcagcgtctgccctccctttgcgcgcccgccgtcgacggcccgccggctatgccggccgacgacctcgccagaccggcggagctcgctcgacgcaacgtgaacgacctcgcgcatctcgtcgaggagtgtgtacgagagcggcttggcgtcagcgtaagttgccgggacctctggccgaccatcgacgaccgacgaggcattgccggatgcgaagagcgagctaagcgtccggccgagccgaccaacgccgcgctgggcgagccagacttcgctgtcaacgcgcttccagacacgctcggtccggagccgcatggcctctgcgagctcgagcgcaaggaggaccgaaggctccaaggcggcctcgtagacgagagcggccgtccgcgcgaggacacaagcaagcgcctgggcattgtcgaacgtgatgagcgcagtgaaggcggcaaaagtatcggttgctcgattaaagacgtccgaggtgaggtcgaccgctacgccgacggccggggcgacagagctgggatcctgcgatggcacgagtttggtcgaagcttccttcgcgccgagtgacgcgacagaatcgagcgggatagcggaagccgtggtcgttctcgggctcgccgagatgtccgagcagcatcggccaccgccggggagacgcgggaagctaggctgcttcgcgctgccatccagtgagggctcggctgacgacttctggactctcgtgacgacgacggtggcgacggccgtggtgaccgggctgggctcgctcggagtgacgatggcgatcgtgagcggcgtcttacagaccgggaccgcagagtcggccatcacggtcgaccgggcagccgtagccgacgccgatgagcagaacgatgttggaggctcgatatcgaccgcgaatgatgggagcgtgtgcacgtcctcgacgacggagcacgcaacggccgagttgcctggctgaagggccgggctctccttcggcggcgtggaaaacgtaaagacgtaaaggagaacgctcgcgctgaaaaggagggtgaaggcggtcagttcagcgggcccgtcgcccggagcatgcaaatcgaagcactcacacgacaagcagcatagctcgagactctggcccgtttaccgtcggcgtcggcttgaccgttccagccgtctcacggaggatcccgccccaaacggcgaccgcgccctcgacgccccgcagctcctccatctcgtcgagcgcgagcgcgaacgctttctgcagcggccgctcgcccccttcatcgtcgttgtcactggccgaaaggtcgaccggtaggacgcgcgttgcgtgcccggtcgagctcgagagtgtgaagcggagcaggccgagcgcgattgacgttgaggccaaggtcggcccgccgccgtcgccgttgtcaaagttggtcaagccgtcgatgaactggacgatgaggatcgaggagggcgcgagccggccgagcgagcggatgtagcggtcgagatcggtctcttcgtccgccagggcctaggcgttcaaggaaaaggggcaaaatgcaaggggtcagcggcgacacattttggactggcgatcgcagcggacagggaacggaccgtcggcagcgggagtcgcgtcaggtcgtcgatatcgacgctcgttcgtgccgtcttgcccctgccgaacttggccgtcaggtccctcacgtccagtaagaccggcccttccgtctcgtcctcaagcgcgctcctgtcgtgtagagcgatgagcgacccgtccacctccgacgaagggccgagtagctctccagcaagctggaacaagcggtcgatgagccgctgccggtcggccttggtcggtcgcgagccgaggaggatgatccggacgcgctctggcaggcttttgagcagccgcttcgactcgtcgactttctccccgccgccgctgctgctgccggccttctcgacggaatccgccgagggctcaagatcgtttcgagtcgactgcgccgcatgaggcccgagcaggccgctagccgtcggcgtgttaaagctcccccacgtcgcgtccgagacgaacgagttctgcccgctcatcgcaaatgagaggaggccagcggcagccgcgtcgcctctcccactgcgggccggcgaggctgctgaagaggtgggctgaaatattggtgttgacggcttgggctgctggcggccgttgagcttcttgcggatccctccggtccgaaacgtctgcgtcttgccggcctcgccctcgcaagtgggcgagaagcgcgctaccggtaaggaagccatagactcggtaaacgacgccgagacgttggccgggtccggaaaatcaagctcgcacgctggcctgccgattcctgaggattgaccgcttcgagccggtggtgctacgccgtacgagaaggcttcgctcgagagggtcgggtcggaatagagcgacggctcgaggtcggcgtacgaaccgccgagcgactcgtcgtcgttccggccgggcgctcgtcccgctgccgttgtgcgcggccgctgatcgccttcgtccggctcactttcggtctcgctctcgtgctcgtgcgagtgccggtcgaccgagctcgagacgaccgatggcgaaggtgaggccgagacaaccgagaaggccgatagagacccctccgacgagcgagaggaccagcttgtgcccgtgctgttgttgccgtcgccactcattcggctgctcgtcgtcgtcggccgatcgcgtgagccgccgccggcgctgctggtgccgatcgtgagccaggcagacgaaggctgatgagcgccgacaggagcgctgccctgaccgccgccgctgccgtccgactcgtcgagctcgtacgaccggagggacgacacgtcggagaaagctcgctcatcatcgtcgtcctccgccggtccgagctcggggcttgccgccgaaggcggcgcgcacggggtgtcgctctggtcgctgctgctgctgagcgaaagcggtggagagggttgcgagcgcggccgagtcgggcggtcgagctggtgattgatcagaacgccggaagcatcgagcgccgcaatggccgagacgaccggcgcggttgggcccttcatgcctgccgtcatcagcgggcgtgaggccgtcagatgggactctcgagatgtttgcgaacggggcttgcctggtcgttaggtcccaatgtcaaagggcgggcgaaggaggaagcaagcggcgagaatcgcgggaggtggtctgctgcgcagttcgagagatcagccttcccgccctgccgaggtcgggtctcggattgatagcagcaacggacccgccggaagaaggaatactcactcggagaggcagtcgagtgagtagcagatgtctagtcgccagcctggccgtgagggaggtgagaggggagtcagtggcgagacggcaggccactgatcagggcgccggcccggctggacggtgcacgggccagagacaggaggagccgctcaagacgccgctgcccgccatgcgcttctcacacggcagggaagtcccacagaccgagcatgcacttgtacgagagctctaattaccaccagccgggtgagagggcccgtcaagagagagggggagggcaggcgccggccgtcgtcgtcccgtcgtcccacagcgacctcctctcctcccgccgccgctcgcccgaccggcaacgcccgctcctgggaccttccatactgtgtcgaaagtgagcgactgaccttgctcgatgaacttctcgtcttgcttgcttgctggatgggtgtggagggcgccaggccagacgagctgaccgacacccgcctcccaagcttcggcctgggcgcggagccccgcatccaaactcccttgcgcccggccaaccctccgacgtcgacctgctcgacctcgcctcgaccgtcgaccctcatcgcctcgaccctcatcgcctgcgaccctcaaggcgctagacatactggcgacgttcctcggtgccttcgcttgctgaaagtctcatcttccccggcctcctcacgcgcccgctgctgctcaactcggcccgccgacgcttctcgacctcctcctcgggcaggcagcgtcccggcagatgcggctctcgctcgtcctttgccgagcccagcaacagcagcagcagcagacatggaagactgtcatcggcctcgagctccacgtccagatccaagcggcacaaaagctcttctcacgttcgtctcctccttctcgtcgtcgatgagctcccggcgtcgtcctcagctaacgcctctttctctctctctcttgcggttcgcttttgttcgtgaaggatcaaagacgagctgggacgacgacgtaaacaccaacgtcggcctcttcgacgtcggctatccagggacgcttccggtccgtctccttttcgtctctctcgcttacagctcaagcgcaccccatcgattgacgcgacgctgcgcccctctcgacgcctcgctcgtcgcgcacttagaccatctctccgcaagtcgtcaagcaaggcctcagtacggccctcgctctcaactgcaccatcgtccgtcttctccttccctcccctcttctgttcggatgcccttaagaaagctgacgccgggcgtgcgaccccgaaacggctgggtcttcagccgccggcatcgcagtttgaccgcaagcactacttctaccacgaccagccgctcggctaccagatcacgcagcactaccgtccgttccctcttcttcctctctttcccgcggccgacatgaccggggctcatcctaactggatgctgacttccgccgcttttcatcccgactggcccatcgacctgtgcgcacagatccgctcgcgctgaaaggctacctcgagattccgacgacgccgcccaagcgcatccggatccagcagatccagctcgagcaggtccgaccgccccccttaaacgcccttctgttcgatttgtttcctggctgacgtgcgcgccttgcctgctcgtcggcgggaaaataggacacggccaagacggggacggctggcgaggctgtgttgatcgactacaaccgcgccggcacgggcctaatggagatcgtcactgagcccgacattgagtacgtcgctgtcctctggttcttgccgagcgaggggccaaaggacgggtcgctgacgtccagctgggctgagcactggcaggtcggctgaagaggcggcgctgtttctgaggacgatccgggcggtattgaggcggatcggcgccagtggggccgacatggagaaggtccgtcctcttcccctgcatgcgccgataaggagcggcaaagctaacgccctcgcgacaaaagggctcgctcagggtcgactgcaacatttcaatccaccggccgggcgagccgcggggcggccgggtcgagctcaagaaccttgccgtcatgaaccagctgcaaaaggctgtctgtgcgtcccctaccggaagagagagacagattacctcttggcagtgccgctgccatctactgacgctctcttctggccttctggcgtacctcagccttcgaggttgctcgccatcgccagctgctcgaaacaggtcaggccgtcgcgcctgagacgcgcggctttgaccagctctccggcgagacctacagcctccggagcaaggaagaagtcaaggactaccgctacatgccggatgggaacctgccggtcctccggcctgatccggtacgctccctttctgcccgttctcatgcacgcgcgctctgtcgctgcatgccactgaccccaatcacgtgtgcacgagcaggcctacctcgaccggctccaagcaaacctccccgagctaccctacccggccacgctccgcctcgagcggacctaccccggtctgaccgcccagtcgtccgccgccctgctcgcgctcgaccccgaaggcttcgccggcatcgccttctacgagcgggccgtcgaggcactcggttcgctcgatggagccaaggcgctcgcgaattggacgatcaactatgtcgcaggcgcgctggcgaaggaggggaagacgtgggatgggcccggggcgattgcacctgaggagctggccgagctcgtccggctcgtcgagggcgggaaaatgacgcgtgcgcccttcttccttcctccaccctcccactcgtcgactctcagacggatccccggctgatccccttgcccttcgtcgctcagacgcatccggccagaagctcgttatcctcctcgcccaatctcctccctctccgacctcccgcctcccctccctcctcacctcctcaccctctctcctccttgcctcctcaacagccctcaatctccctctcctcgtcgctcaaaccttcgccgccctcccgaaagcggtcgaaaacgtgacgagcggcaagaagccgtcggacgtgcacaagctcgtcgggggcgtgatgaaggctgcaaagggaagggcggagccgaaggaggtgatgaggcttgtgagggaggcgctggggcttggggatgagcgcgactgaaacgatgggtctctgcgctcgatgaagaccggcaagggaaaagggcgcacttccaaggcgcatcagtgctgtggcctgtactcaccgctgaccagttgacgactcttcacgctgataacaggcatgccagcagctggcctaccaacgacccctggcggcttgcacaagatccaggcagccggcccgggttcgcagcaacgacgaaagtggccaaacgcgcatccggggccatcttcgcgcctctcgctccccttccgctccaatgtcgactttccagcaggacacccctcagctcgtcttgttcgccctgacgcctcctgacgctctgtcctcgaccgaccgaccgatggcggcctccatgcgacgacggcgtttcgcaaggctccagttagctgcgagatcgtgcaaagagtacatgggtcaagaggcagagcggataaggcgggaggggagggaggggggcgggaggggaggagagggagttggtgagggaagagagagatgccgacccgcaccttgctcgactttaagtaccctcgcccggccagctgctgggctgtgtcccttgtcgtccatcacgtctcctctcctctccctctctcggggcaacccctggcaacttgccccgcgccaaggcaggctagcatgcccgatgtgatggccgctagggtttcgatgctcccaaaggggtcatcgccgacgggcccgacaggggaggaggcagcaggagcaaggccagataggacggccggcccgggacgcggttgagaagaacgccggtgggactgcgcgcgcggggctgaaacgggggcgcggccgggatcggtaggccggatggcgggcgacaggggccgaagtcgagagacgggaagcagagagaggggcgtagaggcgtgcatgcgagcccctctctcggccggtccggtcagtagccgggacccttcgcgagagaggtgaccgccaagccaaatagcgggcgaggggggattgcaaaggtggcggccagagcgtccgatcggtagtcgttggcgagctagctcgtcggtcgtacttgcagccatcaacaccgacgaaggacgacgagagccgggccggtcttcgggcccggtcggcgcatgctccttgagcgaggggagctttaggcgggaaccataacccccttcgacgtcggaacgcgagctaaggcgtacgatggcgacctgctgtaggctagagagggtgagcagagcgagaccttgagcaagacggtcagctgtcgcccctgtcctttcggccaaagcgggcggtcggcgagcatcgcactcgagcgcgaaggggcgcggtgcgacgcttgcccgagccggggccggcccgcccaaaggaggtcgccagcaggtcaaggtcagtcggactctttcggtcgtcagtccgccacgaagggcagctgctagcgtaggagctcgacgcgcgggaaagggagatggtgcaggtcagggtccccagactgccggccgtcatggcgagacaaggtgaagaggagagaggagatgggggcgcaaaacgtcgatcgcccgcccctgcaggtcacgggtgtcgaggcccgtgctggccgtgagcctcccttacagagccctcgcgcccgcccgcccaggcgctgctcggcaggtgtagcagcagagactgacagaggtacgccgagctcgtagaagctgcccgtcttcctctgctcgtcctgctcgacaagtcaaggcttgctgcctctttcacatgccggccccgcgtcggaaaccggttgccgtctcagccgcagagtgacgggcacagacgtcatttccttgctgcgcgcgcatcacgcacttccagcgggcggtgggctgaagccttcaaaggcgagaggggggctggcctcctcccttcctctctctccatcacccactcttcttcactctcaaacaacctcaccctcaacccaaacccacccacctttttcaacatgtccaacatcgtcaacgtgagtgctcgctcttcctctccttccctccggccgacctgcctcggcttgctcccggcttcacatctcccatctcgtccctccgagcctgtggctgaccactctcccgcctcatcttccatcaggccgctgtcgactccgcctcgtcggccgtcaactacgtctctgagtctgcccagcagctcgcctcgggtgcgtccaaggagaccaacaaggaggtcgctaaggactcgaacgcctcgatcggcacccggctgtctgctggcaaggacgccctcggcgacaaggtcgacgagtcgaagcacgacgccaaggtccgtcttgggccacgttcgatccttgctactcttgctgactcgctgccttcctactcctttttaggccgagaccaacaagcagtccatctaagattgtcgcccgctccctcttccgtcctcccatgtagccttgcaactcatgaccctttacgcccttgtccaaaccgcgtcttgctgtcggccgtctggggcgtcgctgcagtctgatctacgaggtcggacttgaggcagtctgacatcggcagcgaccttctaaactgttcatctcgctcgcatgcggtcctcagcgtctggcatcgtctcctcgtcgggttagccctgagttgagtgtgtgaggagtcgagcgagcgacggtccacgagcctcgctgtcctgagccgactgtcagccgggtccgactcgacccgctgaccgtcaacagctcgcagaccccgctccggccatcctccttctgcccttctcgcttgcttctcctgttctcttcgactctcgctcatcagcccgctcagcagcagcagcctccagtgcaaaggaggatcaatgtcgcccaccatgcgcgcgggacctcgcccggtcggtatcgacccgagagcgcacggcgtcgtgaagtcattcgctgcagcagtcgttcgacggaggtaaacagggcatggctcgcaaggaagaacagaagccgaggtgcgacagacgcgcgagcggtggcttgaatggaggtgactcagtgaccgacgacggcagtcagatcccttcgaagggcgagagggtggcagacagtcagaaaaggtagatagcgaggaagcggttgatcgaggggtcgcacggcttcttctcggcccagggctcaacgtcaaaggaggagctgatggccgggtgtctgagcgagatgccgagcgtcagcggacgagcggtgatgctctgtgcggacgagaaggagaaccgacccgatgcggatgcgccgtgtgtctggctcggcggcaaggacgacgtagacgagctgctcactcacgattggaagacggtcgagtcagcatctggtcgtgagggacgccgatggtcgccgagatggaccgacctcgaccagacacttggacaggtcgaacgccggctcaggagcatcgagggcgcgcttgcgcgagtagtccggggtctggagagagcggtatgtcagcaccgtcgtactcactgcaggatgagggaagagaaacgactcgcactcgccttgaacggattgttcagcgtagtctcgtcgggcgttgactcagaagacaaggcccggacagtgacaggtgtaacgtcggcctgaatgaagcggtgaaggcgggtggaagaagaacgtcagcgagagagatcttaccgtcagtcgcaagggcgtgttcgcactttgaaaggctcggccaggtgggcctcctcctgccgcgctacgagccgcttgcgctgggccgtagaagactgtcgagacgcggacaggtcgggcaaggcgtcagtcgggcagcctgctttgagacaacgaggcacgctcgcaccttgaatgggtcggcgaggtggctctctagaagatcgtgcgggatgacagaggcgcgaggagcgaggccggctgcggaagcctgcgaagcagagcaagcagcggtcagcatgccgggctgggcggaagaagaggagggtgaaaacagccgcaccttaagaggttcgagtagggccgggtggtccggcggaaggctgcgccggtcgaccggagaggcgagggctgagagggggccgagcgcgcaggcaaaggcggcggcgaggatggtgaggccggaaaagcgcatagctcaggaagaaggggggagcgacagcgggatgggatggacgttggtagaaaagtactcgacgaccttttcatcctcagcaggtcagtcggacgacgaagctccggccggcgctgggggggatttggtacggtgcgcagtcgtcctcaggccgaagtccggccgttcgatttgttaaagacggtcagcacgcgacaaatcccccgccaaagccagccccttgctctttgagtccatgttattcacagctcattgcgacggctcgagctcgagtcgcatgcctgagcggagcgacgagacggcagcctgtcagccctctgacctatttgtcgagcctctcgctcgagagcgcgcgggcgcagaaacgcaccgtatgccgactcgccgtcagcgtagtaccccttctcgacgtcgtgaaccttgaagccgagcgagtcgcggtacaagctgatggccgcccggttcgtcttgcggacgtgcagcgagacgtattttgcgccgtagacgtcggccatcgctagctctggaggggggaggagggggcaagcaaagagccatggcacgtattagcttgaggctcgccaggtggctcgtcgctcgtcgcagcgtcgcgtccgagagagctgcccagccagggacgtacgcgactgccgcatcagcttgttggcgagccctagccggcggtgtgtccggagcaccgagattgacgtgacgtggccgtgcggatcgtctggcttcgcctcttcgtccctgtgaggagcaggattgtctgctatgtcagctcaaggaagggtcgcgacgcaagcccgaccttgcgggggggggggggggtgtcgagcgacgcacatcttggcaagaatgtagccgacgatcttgccggacgacgggtcctcggcgacgtaggacagctgcggccatgtcagggcgtggtagaggtctagcaggaggaagtacgagaggccttggtcagagcgaggaacctgatcgatggcaggagagctgctgagaggcagcttggtcggccgaggaggaaaccgggacggacaatacttgaacgtgtagttttcgggcaggttgaagatgttggcgttctgcatgccaagcctgatatcgtgcaaacagtcaccctggatcagctggcaaaccacagcagcaacggcgcaaggaggagggcggacatgtcctcaatctggtcgagggcgaggggcaggcgggggagctcgacgtcagcgctggcaccggctggacgaccgacctctctatgtcgccacgcactgttgcgatccgaatgttcatcctggctgcgtccgtatgaggtcctgaaggttgtcgagagtaggaaaggggagggaaggccgagttgacgatgctggtggtcgggcggcgacggacgagctcgttggctcggcagcgactctcgtccggctcgctgctaccctcccgaccgtcaacctcgtctagtagctcaagatggcctctaaatcctttggtacggtcctgtcgtcgctcatatgacgcagccggagctgatcatgccgcatggcgacagtctttgttaccggcaacgccaacaagctccgcgagggtgagctctgtcttcctgcacctcggacgaaagctgccgggctgaccaccctctcaaccttgcagtgcaggccatcctctcctctggcacctcaggtatcgaggtccggtcgaaagcggtcgaggatcgtgagtcgggatctgccgctgcagcttgcacgcgtcggtctcctgcttcttgcttgcgctccgtgctgactccgactgtcttcgcctcgacagtacccgagatccagggcaacacgcacgaggtcgccaaggccaagtgcgccgctgccgctatcaaggtaggtccggctctcacccgctgagctggctgatctgtcaaggctgaccgcggctgatcctccgtctcacccatcctttgacagctcggcgagccttgcgtcaccgaggacactgcgctggcgttcaccgccctcggcggcctgcccgggccgtacatcaaagactttatgacccttgtcggtcatgatggtgcgtagactcgtcgccagctgccccgctgccgagggagatgctgatgcgatcctcgtgcttcgcgctaccctcttcgacaggcctcaacaaaatgctggccggcttcgattccatggcggcgacggccatctgcacctttgcctactcggccggcccgggctccgagcctctcatttttgaaggccggaccgagggcaagattgtccccgcccggggcgacaaggtctttggctgggatccgatcttccaacccgacggctttgagacgacgtacgtctcgcccgtcccgcgtctgcggcctggctgtcttgatggaagactgaccctggcctgctcatctcgtccgccaggtacgccgagatggacggcgccgcaaagaacgccatttcgcaccgcggcagggcgctcgagaagctcaaggactacctgcagacgcttccatagaagatgagccggtaaggcgtggggtaagggcagacgagggcagaacgcgtaaagtcgcgcccacgattcccagcctcgggacacttcccgcggcgaggtgcctgtccctggcaaggttcgtctctttcccaacatctcctctcgctctcactaccttcactgaccgttgctccctcctaaccctcaagccgccctttgcaacaaggttggcaagtcggagcaagacgactccatcgaggcctgcgagcgcatctagtatcgctccctccctacgtcctactttcatttcgtagacgatagatgatgcctacatagcgaccgttcctccggttgctttggtgaatgcgctcagcgtgcccagccgtgtcgagtgcagcgacagccgtaatgcttgctcgggtcacccctcgcttgtctctttgcccgctgcatttcggccgacagcgacgacgcttctcgaagaaaaacgacttgcgtgctccccaggtcatcgtgtttatcgaccgggccggatgcaagccgtgctgacgggtcgctgacacagccctccacttcgcgtcgtggcgcctgcgcaaagacgccgtcgggcttgacgttttcaaccctcgcggcctttcttcgacctcccaacactcacctcctctctcccctcctgccctaatcctgcgcatcactttagacatgtcgacctcgcgtgccttcactcccgtccagctcggttcgatcaagctcgaacaccggatcgcgcttgcgccgctcactcggtgcgtcgcctcctcgctgacgggcgcgcagcttaccccgagccctgacccatcgtcgcctctcttctctctagcttccgcaatgttcccgacgagcagaagcccacagaccttgcggccgagtactacgagcagcgggcctccaagggtggtctgctgattacggaggctaccttcatctccgtgggtgttttcgtagccagctgcttgatgggtttgcctctgaatgctgaccgcctgtcgacctgaacagcgcgaggccggaggatatgcgaccgcgcccggcgtatattcggacgaccagctcgacgcttggaagaaggtgacggccgccgtccacggcaagggtggctacatcttctcgcagctttgggccctcggccgcgccaactttgctggcggcggtgcccagctgctcgaggacgtcaagacggttgcgccctcgccagtcggcctcagcgacgactcgacgccgatcgagctctcgctcgacgacatcaagcgctacatcggccagtacaagcaggctgcgtcgaatgcggatgtcgctggctttgacggcgtcgaagtccacggcgccaacggctgtacgtcctgtttgcgctcacttcgcctccttcaaggacactaatcttgctctcacacgcgcagacctcgtcgaccagttcctccagaccaactcgaacaagcggaccgacgcttacggcggctcgctcgagaaccgcagccgcttcctgctcgaggccgtcggcgccgccgtcgatgctatcggccaggagcgtgtcggcgtccggctttcgcgtgtgtcccgctccttgccttctattggacgcgtgcagcgcctgacaccatcttcctcttactcagcttggggcaccttccaggccatgggcgagaagaacccctacacgacgtttgagtttgccgtccgccggctcgtcgagaccttccccaagctcgcctacatccactttgtcgagccgcgcgaatgggcgccgggggcggccaacactgaccacctcgaggagggcctaaagtgctcgaacgaccgtgtgcgtttccagctctggcggcgctgttgcggacgaccggcggctgaccttgtgcccgcccttgtagttccgcgccatcattcgcggcgtcgacccggccacggtcggcgacgacgaaacgttcgagtttggcgagccgacggccgagcgccctacggttgtcctgactgccggcggctttgagctcgacaacactgagtcgcacgtcaagcggaccggtgacgtcgtcgccatcggccggcccttcagtgcgtcctcgcgggccgatacgactcgcgttaagtgtctgactcttgcctctttctcccctgccagtcgccaacccggatctgcccgcccgcatcaagcactcggtcaagctgacgccctacgaccggaacaccttctaccacggaggagaggccggccccgctcacggctacaccgactacgagttcagcgccgaactcaaggcccaagcttgagcttacgcgtctgcttgacactgtagctcctcccttttgaccccttgtatcacttagcgcctctcttcagtcgaacatcccctagaatagagacgatcttccatctgcccggacgttttgtgcatgcccttgctcctaactctcgaccaaaggctcactcggcttgcgacggggcgcacatggtccaaaaccgttgttgttacagttatctgagcgacccgcgcgtagggtgcagttacccacccgccgagagcagatccgtccgtcgccaagaggcagtctatgagcagaggtcgtgtcccgaggcggcagcaatgtggaccgggtcaaagtagggcatcgcctgggcctccttggccgtcgcgcgctcctggtggtcgtacctggcagtgcgaacgggcaaggcggtcgtcagcacatgtcgcaagccgttcgatgacggccaaccaatacgacgcatgaacttacttgagcaggacgtcgaggaactggatcgcatcggccgagagccagcgctcgttgtcgggcgtcgcaaatttggaccacggcttgaccttccaggtcgccccgcgcggtatcaggccgttatactcggccgggagcgcaatgtcgtacgtctcgaggtagtcgtgcaggccttcggtgccgagcacacgggcgatccggacgagctggtccgtgttggacgagccgtggaactgtggcgagcgaggcaaaagcagtggtcagcagctgaagctaagtttgcacgccgtcagggcggacgcacgaaggggtccttgcgaaagatcatggaagcaaacatgcagccgagcgaccacatgtcgaggctgtagtcgtactcgcggaagtcgacgagcagttccggtccctgccgcgaggagagcaagtcgcggcccgtcagcatctgatgcgcaggtgattgagggccgagaacctaggcgcaccttgtagcaccttgacgcgacgcggacgttgtattcggttccagggtgatctgcgggcagtactctgtcaacagctgcgagagcaggcgccgggccgcacagcgacgagggacgcacaatattcggcaagaccccagtcaatcagccgcagcttgcgctgcgcatggtcgatcatgacattgtgcggcttgacgtcgcggtgcatgatgcctttcgagtggcagaagtcgagcgcctgagccgggaaggggtgcgcaaggtcagcagccaagccaagccgcgccagcatcggcgtcagcgacggaccttgagcagctcgagcatgtagtagcggacgtcatagtctgacagcctgggatagagcaccttgaagtcgaggttgttgacgtctagagcagacgcgtccgtccgtcagcactggaccggaagcaacggcgcaaggggactgagtgcacgcacattcgaagacgatgcacggcgtcttggagtctgggtcgcgcacaatgtcgagcaggtcgatcacgttgatcccaccgcggaggccgagcaggatcgagatctcgcgcttgatcttcttcttcttgaccggcttgagcgtcttcagcacgaccggctgcgacgtcggaaggtcgatgccctggaacacctgtcgagaaggcagacgaaagggtgtcaacgagtgcaggcgagctggatcatgaagcgcgagctggatcataaagcgcgagctggagctggtcggtagtcgccgcccaagccttcatggcagacggaagggacgcacctcagagtacttgccacgaccgaccctcttgatcacctcgtacttgctctgcgttccccactcaatctgcaggttgtctggcgacgcaaagcaatcaaaggagcagacgcgtcagctgcagtcactaatcaaagctcagcatcgtcggccgactcaccgtagtcccagtactgcttgccctgctgctcgcaggcgttggcgtagacccgggcctgcggacgaaaaaaggaggtagggtcggcgagctcgtcagccggacgtcctccaatcgctcgccttccaggcagtcctgacgcacgatcgagaccgccggagtagagtcgtcagacatcgacatcggagaggcgagaggttgcttgctgaagccggttcggttcggcgacggcgcggcgcgggcaagtcggaagaaggcgcaggtgaagctcgcgagggcagatctagtggtccggcgaccgttggacctgggaagcgtgcagcagaacgagagctctgcgacaaggatggactggagctggtctgactggcagcgggcaggctggaagggttgtcgtcggatggcctccgagccaggttttcgacgcgcagggtgacggtcgcccgcgaaccttgcagctcgacgtcgaccctcgaagcatcgctgaccggcccgctgtcctccctaggctcgagcagggggtcctgcagcactctgaagggtaccgaaggacttggcttctgcactgacctgcactgacgctcccaacagacggctcgggcggcttcgtcgggtggggcgcagctcgcgcagacgcagcagcgacgtgttgtgaaggcccttgcctctattcgaccaagctccgggcttacctggcgctgtgacgaggactcggcagctgctgtcgacatgtcgctggactgccttttggtgaagccttcgcgaacggctgatttgggcttcgaccctgacctgaccctgccgtgcgcaagaacgaggccttgctcgacgcgtggtggtaaggcgacgacgcttcgggacgcagagctcggccgctcttggaggactttggcaaagacgcgccagtatcgccctctagccgccttgcgctcgccggactcagctcgacagccggatcggcctcgcgtgcacaagcaacgtcgccagggccggcgccgcataatcatcttgtgacgcatggtcgtcctggtctcgacggtctatcgacctcgcagatgcctcagatctcgccgctcgcgctgactcagtggctcagccgtcggcggcgactgtaccttcagctgctcagccgtctgagcctctccaccagcgtcgactcagtcgatcccatcgcctctgctgccttggtctctgccaccaatatcatcaccttgccaccaatcgttgtcgcttccgcagccgtcttctccagcggaaccgatgcctctgcaggaggcctctactgtctcgacggctgctgcgccgcttccctgtacgtctttcgcgctgactttgcctctcgtttcgactgatcttcctctcatcactgctttctctcagcgtgggctccaggacgctcagcctggactgccgttgaccttccagcgcaagacgcggcctgcctgggtcaaaggagaatccgagaagagggcaactgagtgtgctcagtttcacgccgagcgacgtcgacggaacttttttcggtcacgcacgtcgcgactggcgagcctttcatgatcggtctcaagagggcgcgcatgaagaagggcggaaccggctggtagcagccatcatgcaggcttgaagacaacggctggcgggcgagcggcgggacgtcggcgactgactggcgtcaggtcccgcgggctgctgctgctgctgagcgggcgggtgagcgagagtcgaagagaacaggagaagcaagcgagaagggcagaaggaggatggccggagcggggtctgcgagctgttgacggtcagcgggtcgagtcggacccggctgacagtcggctcaggacagcgaggctcgtggaccgtcgctcgctcgactcctcacacactcaactcagggctaacccgacgaggagacgatgccagacgctgaggaccgcatgcgagcgagatgaacagtttagaaggtcgctgccgatgtcagactgcctcaagtccgacctcgtagatcagactgcagcgacgccccagacggccgacagcaagacgcggtttggacaagagcgtaaagggtcatgagttgcaaggctacatgggaggacggaagagggagcgggcgacaatcttagatggactgcttgttggtctcggcctaaaaaggagtaggaaggcagcgagtcagcaagagtagcaaggatcgaacgtggcccaagacggaccttggcgtcgtgcttcgactcgtcgaccttgtcgccgagggcgtccttgccagcagacagccgggtgccgatcgaggcgttcgagtcctcggaagccacgcactcaggcaggcagaggggccggctgctgcggttgctagggatcgttgttatgcaaaggtcatcagccgtagatgacgcggaggaacgacgcgccgcggcggcagtcgacgcgacggcccctccaggaagccgatctctcttaccgctctccctcacccacacttaacacccagctcaagctatccaactttcacgcttccaccttcctccatgtctccctccaagagcaccgccgcgccggccgccgtcacgtcggccttgcccgacaaccacctccagcaccccgagtcgtgggcgaccggtggcgacccagcgacgggcaagcagcaggcgtttgtcgcctcgctcgaaaagcagcacggcgtcgacctcggcgttgacgagggccagctcgggaagagcgaggcctctgaagtcatcgacaagctcaagcagggcgacgtcgagggcgccaaggacatcgtcggcacgggcgagaagcgcgggcacgaggcggtcgacaagggcgaggaggccggtaaggccaccgcagcgtcggccagcaagtcggaagacaagtcgagcgaggaggactcgaagaaggccgcgtccgacgcgtcgtcggccgagccgcctgcgaagaaggccaagacggacggcgaccactcggctgccgagtccaagaacggcgacgctgacacgtccaagctggccgcttcgcctaagaagacgacgacggcaggcgacacggcgacgtcagccgagtcgatcgccgccgatggaccgacgacaacgactgacggcgccaagattgacccgaccaaggacacgtcgaccggcgcgcccgctgtgaccgaggccaacggcgagtcgaggctcgaccacccggagaattgggcgaccggtgcgtcctgtactgggcttgcagctctatttttacctccgttgaccgggtgtatgcgcccttttgacgtcaggtgatgacccggcgaccgagaagcagcttgccttcctcgccgtcctcgagaagcagaagcacgtcgagccttcggccgaggagaaggcgggcgagctcggcaagacggcagcgtcggagaagattgaccggctcaaaaacgacgcctagagcgcgctcactccgtcgcatcagtcgcttctcgtgctcgctctctctcttgcaaaaggaggctccagcctctcgcatgcccagcctcccctcttggactctgatctgttgtcgactcggcctccacctcacgtagccctctcccatgccactggcccttcttgcctggccgctgtatcgattcttttgtgcgatgtctgcgacggtcgatccgggccgagccgccgggcggcgctcgctgtcatcggagatgagcgacgacgaggatgagtcctcccgctcgacctcgactcggcctctcctcttcatcagctctcttctgccgcatccagccgacggaccttgctactcgctctcgacagccgcgtttcgggcgaatcgcctcaaccagctcgctcaactctcagtcaccatgtcctcctcgcggctcccctcgaagctctcgtcgctcctcgtcactgtccccaacctctcagccgccgcccaggccaagctcggccaggctttcactcaagtccactcgcacccggccggagagggcctgacggccgagatcctcgccgaggtcgacatggccttcacgactaaccgggcgctgagcgacctcgttcgcgacttcaaggagacgccaaacctccagctcgtccacctttgctcatccggtaaggcctcgcaacttctcttcagagccggtctggctagcaagctgacacctggcttgcccacttggtgctcgtctctcactttcgtcggtacgacaggtgcggacaaggcgattgcctcggccgccttcgcccaccagacctcccatccgccggccgaccagagtaaggacgtcaccctctgctcggcctccggaattcacgtccactccattccgagctacatcatcgcgacctggctggcctccttccaccggctgccgatgcagctgcactttgccaaggtcaggccctcggatgtgctgcgccgcccgcccgcaggcacgcagaatgactgactgctcggaagctgcctgcgtgcctcccgcacaggttgagcagcgctgggcgtccagtgaagaggtcgctggcggtcctcctgcccgctactatgcacgcagcacgcgcggcttgaccgtcggctttctcggctacggacacgtacgtcccttgcgcaggtgacggcttggccaaagctgaccttctgacgaccttgagcagctcgcgagagacactgctcgtctcatggtccccttcggagtcaagatcatcgccgccaactcggacggcaagcgcaagaaggacctgggcgtgcgtttcagggctatcctccgctctcgcgtccgctgcactgaccggtgattgctcccctgccagtttgtttaccccggcaccggcgatgttgagggtctgtcctgctgccgccatcgcctatcgattgaccgaccgtgctaacttcagcccgcttccgaacgccgcagctgctctcccagaggccatctattcgacttcgtcaggcgaggacctcgagaccttcctcaaacggagcgacatcctcgtctgttcgctgccgtcgacaaagcagacggccggcctattgactcgccagaggctaggtcatttacgtgctcgggtcggtgtcgcgctgagtgccgactgacaccctctcgcgtcgacttgcagagtgccttccgaaggacgctcttctcatcaacgtcggccgcggcaaccttttccaatcgggtgcgtctaccagcggccattgatgacatcggtcactgcgctgacgctcgcgaccatctgtagacgacctgcttcacgtcctcgaccgaccggacggtctttggggcgccgtccttgacgtcacccagcctgagccgctgccgcaaggccacccgctctggtcgcacgacaaggtcatcgttacaccgcatctatcagggtgcgtcaagtcgctgctgcaccccgtgggctctcagacggctgaccgtcctcttgtagcgactcggagaacgagatggacctcgcagtcgacatcctgctcgaaaatgtccgccgctgggaggctggcgatctactcgcgagcggggtggacctcaaaaaaggctattgacacgcaagcttatagtcttgagttgatgatgacattctgagactcataagttcgtgacgtgacaggaaggcgacggcaggtgaggcgattgacggcggccggccgacggggatcaatatccgcgtggtcgaggccgcagttgattcaggattgcacacggcagcctggggccggagggttgtcgttcaccagtggcggaatgcatggcgcgtgatggtccgcgagaggcggacgggagacccagggcgacttgagtggtccgttttatgtgcgggatgagcgccggggcaaggttgacttgagggctggaaagaggaagaagaatgtcagctacggcttcaggcaggaaggcggcctcggacgaagtcagactcactcatcaatgccacagatgaggtatgctactcgcgccgccaattgaagagggcggctgttgctcctggcgactcgacgacgtccgggtgcggcgtgtcggcgtggacagccttctcctgccagcgcgaggagatgagcgagccgacggcggtcgcgatcgacatgctgggcgcgacatgcttgggcagcgagaccgagagcgaggccggcggggttcggagccaggcaacggaggaggacgaggacgacgacgacgaggccgatgagagcgaggccgagagggccggcgccgagaggtcgaagacggagacgcgctcgatgaagaccggcgtcaccagctcgtcgtcggcgtcgtcgtgctcgaaggcttcggagggcgtcgcgtcccactggatcgacgtcgaggccgacgagatgacggaccggacgtcgtcgtcgcccgacgcaagctcttcctcgtcaaactcaaagagggcctcctcctcgagctggccgtacgagtcgggcaggtagggcgatcggacgccgtgcggctggaacgtaaagtagtcgacctcggcccgggcttggaagatgggcttgaagaaggcgagcgtcgggacagcgacggcctcgttggcgtcttcatcgtccgaccagacggaggaggaggccgaggcggccggcgaggcgtcgtagatgaacgagctcggaccgagcgtcgcccagggagaagaagggtgcgggctggtgaacatggcgtgcagagggagccgaaagagaggttgggctgctgctggctggctggcttgtgaggggatgaggggaaaacgggtcagtcgctcgaaggtcccgcctggtctataagggcggctcgccgcctcgtcagcgcgtcgtctccgtcctctggaagatggccgggaagagggcgagctctcggcacgggcgaaatcggcggccaaggcagcgggcaagcaagcgggcgccgggcatctgcgtccgcccggagtggggagaagccgcagcagaagagtcagcccgtctccgttgccgaagcctcggccggcctcgcgcgcgcgcttcggcatgaagctgaggcggcagcccggcaaggctcagagtagctgcggtccagtcgacgacgttcatgctcgcatctctttgctgtcgagtgagcaggaggcgagtattgcggctgccgtgtcggaaactacgacgacggccggccgccagcagcagtcgccaagaaggctcggccctagcagcaggcctcggcgaggcttcgaaacgcctctgggctggatctggtccggtcactcgggcatccaagcgacggcggccgagggctgatcgagcaaggctcgatcacatcggagccggccccccacctcgacgacgaccgcgctttgaaagcgactccatcctgactcccatggccgatgcccgtacgagttcgcacaatccatcatcatcacagcaccgacagcttgtcgttgtcgaagccgctccctcgttcagcccaccgccttttaaagggcgacggccgaccgaccgcctgctgaccatctctttccacgacgtcacgacggctttggtccgttcggaagcgcatcatcagcagcagcggtgcgctcgtcaccgacttcgcgagcagagctagagttgactccggggcaagcaaaagcttcgcctaaaaagaactcgggcggcacgtcgctctggtcggccggagtgccgagctcctgagccgacagaacgaccgggacaaaggggctggcgtcgagcgtgctgccgatgcccttgcaggggatgcgcaggctgagatagtactgttgggatgcgagaaagcgggtcagtcgaacgttcgacgagaaatgcgcgtgctgcaacataccgagcagttcaagagaccccgggtgacgtcgaggccgaacgagggcgagatgccgtgcgtgccgagcttgccgagtatcatctcgccgacgatgaccgtctccatcgcccagcgcttctcgccgggcttgcatttgcgggcgccgcccgttcgacgcgcatagtcgtccatgtcgagcagcttggccgggctgtaccagactcgccgctcgtgcgcgaaggcaaacgcaggaccgaccgtctggacgaaagactgggtcgcgccctgcgccgtcgtcgtcacctggcgctcaaggttgaggtcgattttggccaggtcgggcaggtcggcctcaagcccatcagggggcgtgcgcgtccactttttggcgtccgaccagggcgtcggcgtctgatcggtcgagaccggtgccgagagcgtgagaagggagagccggaaaggatagaagcggccgattgggatggccgggatggaagggccggagaactggaggcagcgcggcgggtcagcctcctgacagcagactttgtgcgcgcgcaagatgctcacggcgacgacgagcaggttcttctttgagagcagccgctcgcggtaccagtggtcgatcgcgagcgtcgcccagccttgctgcacgttcggcgcaggcggcggggctggcgtcgagttggccaggtcagcaaagacgagcgtgtctgggatgccgacgttgaacgccggcgggctgcgaaggtgtcgaacacggtagcaaaggtcagccgcaggtcgagctgggcagctgctcgtagacgcacgagtagatgaaggggaagatgatgcgatcgtcccggctgaacgtcgacgacttccggcagtgcagcttgacgaagtagacgacgcgcgcaacctcgtcgccgtcgacctgccgccgacgcgaggtgagtggcatcgaccgcgagccgccctggaagctcggcgggagcgccatttgccacgggaaggtgaagcggacggggatgtcgattgatgcagtgctcgcgctcgacgacggcgaggcggaaggcgcgaagcgatgcgactggtcgggcgtccagatggtctgaaggttgctgaactgaaggcgggcgggggtcagctactacagttgaggatgacaggctggcagggacgacgcacgaggatcgtctcttccttcctgcgatctgccggagggagcgtagctcgtgaaggtcagctaaagcttgagccggtttcggctcgcctacgcacccgtccgccgctgagcaccgaccgggccaggattcgccctcgacaccaggaacgtcgtcaactgcgtccctcgcagctcggccgtgacgcgctccatcttcgggacgcccttcgagtcgagctcgagctcgaggtgggccatcagctcgatggtgtcgccggcgcgcacgacgtcgtgctggccgggaaaggtggccgtcaagtgcggcttcgaggaggtgatgtgcatagtggcgagagctgagagacgaggttggtgtcgggcgggaaggagagcggccggtgcaatggtcgagcttcatggctcggaggggttgcggagccgagcccaccgcagaggctgccggctgccggcgccgtgccgggtccgacccttccgtcccgctcgctgcctgcgggcgatgtcatgacggtgggaggagccatgccaagatgatgcgaccggctgtcgaacggtgggaaagtaggatagccgtcggtcgtgctgacaggctgcagacgagcgtcggccgacggctgcgcgattcagacgcggggccgctcggccgagaacgtcgagtgcccatcactttcggtcgctgacgcgcttgctgacgagatgcccggcagaagggggaaggaaagtcgggcgcatcgcattgcaagcaggagcgcagggtagtttgtgagggacagagaccggcgcgccaggcgccgctccctcgggtgtcaccgctcggagagagcagattgggggatggacgctcagaatgagtactgcgagagcaggcaaggcgatggttacggtgagcgaccgtcggtaagaaacgagactgaaaggcaggacgtacgccggtgatcgggacagagctgggctccttcgtcgacttgacggagccgccggacgtctggcaacgagcgcggatgagagccgggcgttaggttgaggctcaaaggcgggcaaagtagtcgtctttcgcaccttgagagccgaccaattccaggtgcccttgcacgagcccgagccgcagctgcagaaaaacggaaagggtggtcagcctgcggatcctcaggcaggcagcgctggcagcaaggccgacgcacaggatcttgacggcctgagccttcgagccggcggtgacggttgtggcggcgccggtgaacgagacgttctcgatcgcgacgccgttcgacgggtgaccggagggcgagccgttgtcgtagtctggcgtgaagcatgctcggcttgtcagcgctggcacgcctcaagttgcagcaaaaagggctccagggaccgaccctgctgaatgacaatgccgaccttgctggcgttcttgatcgtgttgccgtcgtacgtgatgttcttgaccgaggccttggtcgcgccctcctgcgtcttgatacgcaaaccattcgagctgttctcgaccgtgttgcccttgatcaggacggtgctgcgagggcaggtcgacgacgtacaactcagtaagcggccagcctagtcgttcaggaagcagaaggacgtactcaacgacactgcccgtctggatcgagccgatcgagatgccgtggccgcccgagcagaagttgttgaggaacttgatgttcgagcccttgttgacggcgaggcagtcgtcctggttgtagcagaacgagttctgaatcgtcgtgtcggtggccgagacctgcaggcgaggaagaaagtatggcggtcagcccgggcggcatcgcacaaggagaaggagcagcggcgcacgtcaaagcagtcgctagagatgtcgtttgaagcagtcatcagctgaggggcagacatgagcgaagcagagtggcgacggacgaattgtgcccgagcgccttgccgtccgagccgagcttgtcgccagctcggttgtcgatcgtgacgctgtcaatgacgagcttcgacttgttgccgaccgagaagacctggcggggcgagttgatgatcttgaggttgcgcatcacgccagacatggtgacacgcatgaactgcgagggcggacgatgcagcagaggtgagctgtgggtcttcagtgagcaaagaagtcaaagacgcaccttggccttatcggtaccgccgttgctgccctaaatgaggaaagtgacgggctcgtcagtctggcggcgcgagacggctgcagcggagagaggctccgcgcaccttgccgtcccaaaccttggcgccctggccgtcgactgaatggcaggcacagagttgtcagccgagcttctattcggcgcaagcaggtgtcaaggcacgcacagacgtggttgttgccgcggaagtcgatgtcgtcgcccgagatgctgaagaggatgccgtccttccaggcagagccggtgaaagtgacatcgccgttgaggtgcactactgtgcccttgaggaggccggtcaggtcaaacgtctgcttggccgggacggtaaacttgttaatgatgatcctggagaataggggagggcggaagggcagtcgtcaaccggctgtcggcacagggtaggcaaaggcggataaaagggaagggacgaacgacgtgcacttcttggcccctgaaggacagcaagcaaacgagagcgtcgtcagcaatcagctgaaggaagttgcgatgaaggaagacaatacaaaccggcgacatctttgagcgagttgatcgtggcctcgcagcgcttgccgaccggggcagcgtcgacgaggacggccgtcgcggcgaggaggccggtcaggagggagaatggcgagacgagcatttagaaggaaggaaggaaggaagggtgccgggtgggcgtggggagcgagccgtaggagaggagggagggtaagggaggaagggtgatgagggaaggggagaaggaggtcggccggccgccagccgacctttataggaacgccttccaggccgttgctcagcctcctcttcgcctccaacgtgatgcccgagattaggggacgctgcgggctctgttgtgagctagcgaaggggtgctttgagcgggaaggcagagcgatgggcgggcggatcggtcggccggctcggtcagaagctcaggggtaagcggtcgttcttgctcttcggtccaagaatagttcgacagggcttgggttcagcacgacccacgcaaactcttgctagccccttgaagcgtttcgtcctgcaagtgagagaggaggagggaggcgtcggtcggcccttcagatcgatcgtcggtcgggtcggcagaagaggtcgccggccaagccatcgcagcccctcttcctccggccgtctttcctctctgtgattcgactccgactgaacgaccggtagtacagctcgtagaggagggtcagctaaggtcggcaggcctctatctctggccggagcagctggtgaggtcaggtcgccggtcgacgtcgatggaaaggaggttggcacggccccgcggggcaggtttgctgctgcgcggcgcgcccgcgggtgaaatcacaatacgcgagagggcgcgccggctgcttctcctcctgtcccccacccactctcccctttccctcactcccttctcccttgcctctaccagaatgatcgccccgtctgtcgctctcctcgcccttggcgctctcgccgtccgtgcccagcaggcgactgagctcgacctccagtatgctcaggtacgtccttcctctcgcaacttggcccttcagcccttcctccgtcgcgtccacctctgcgtcgacctcgcgaccgtagcggcgcttgctcaactcaaacaacaggactgacggaccatctctctgactctgcttctgcccctgcctgctcgtcccctgccgctcttcaggcccagttcatccgtcagtcctttgctcttttccacccgagctccaccttctctcacgcgcgcgccttcttttcggtgccgctctcgctcgctcaccggccgcaaaacgctgacgaaccgctcttcctcgtcctgctcgcccgcagagtcgcgcatcgttcccgacatgctggctgagttcaacccctcggccgtcctctcggtccagttcaactcgtccgactcgccgacgccgatcggctcggccctgacgattcaggacgtcgtcgcccggcctgacatcaccgtcatgcccgccggcaacttctcggccgagggcgcctttaccgtcgccatggtcgaccctggagtcgccggcgccgaccaggcgcccggccagacgcgccactggtccgtctcgtcgagctgcgtctcgtgccctccggcgggcattgggctaacctgttcctcacccgcccgaccgcaggctcgtcaacaacgtctacctcattcagggcgaggacggcaacatgtcgctcaactacacgaccgacgccatcacgacctacggcggcccttacccggccgagggctcgggcgcccaccgctacacgatcctcctcctcccccagccgacggcgttccagtcgccggctgacctctcgacccccggcgtgcgttcctcctccttcaaaccatctcttggacaggcggctgacaaactgaatccgtctcgctctagattgccatctcgacgatgaacttccccgactacatcgccacgaccggcctccaggcccccgtcgccggatggtacatgcaggtcgagcagggcacctcgaccgtcccggccgccgagacctcggccgtccagtcgtcgacgctccctgctttcggcgcctcgtcgtgcgtcgtttcccttcgtggcgcctcatcacgccctttctcgtgtgggcgctgacctcctctttccccctcgcacacgctcaggtccgccgcctcgatgatgtcgtccggcgccgcctccgcctcggcttcgcgctcgtcaactctggccgcctctggctcggctattcagtcggacgcctcggtcgctagcggtggccggccctcggcctcggcctcggccggtacatcggctgcgcccggctcggccgcgttcgcccagtacgccccctcgggcgcgctcgcggtcctcgccgccggtgtctttgctctcctctaagtagcatagactcgccccggtcccttcccgcaacgcattccagaacggacgctctctttctctccttccccttcattcagcgtcgtggactcgtacacccaccttccctaggccccccctttcgctcttcgcacagtctttacgcaacctttgtctgcatgatgctatctgcaagctgcactcgacgggctgaattggcaggtggcgaccgtcggacgcagccgctgcgcgtgctctcggcctccttgctcgttcagcccagtcgtgcgcattcctcaacctctatcgccctcccaccctcccgaacatgttctcctcgtcgtcctcacgctcctcgtcgacgacgccgacaccctcatcgtcgaacttcagcacgccgtcgtcggcgcctacaggctcgtcctctaacgcctcgacgagcagcagcagcagcagcgccgcaggcctgagccgcaagccctgggaccgcccgccgcctctcggtcccatggacgaagaggagtacgacgacgacgatgagaacgatgacgcccggtcgaccttgacgctcaccaatagcgtccgccagagcctgttcaaggttgtcgctggtccgtcttgctcagaggcggcctgcgccaagctggcgtcgagcacctacctggctgacccttgacgcgtcctaccctctccctgcgacaatatggctcacctagggtgcgttttgtggctcatctgaccgagtgcaagaagatgctgacgctcgtgctactatggcttgccaggaggaccttccagaatctcaacgacgccgtgaggcgccctatcgttcttgacggcgcaggccgacgcagcagcagcaagtgttgacacttccttcatctgatccgtcctttagtacacctacccgctcgactcggaagccgtagagtacgagcgactcgccgagtttgcaactcgactcagaaatggcggcgacggcttcaaggacctcgacggcgacgtcaaggcgcgcctgacggcggcaggcgacgacgcgaggatcctcgatctcgggtgcggcgtgaaggcggtctggtgctgccggatggcggagctctggccggcagcagaggtgcgtgattctgttggtcggccgctcaatggtgcgatgagcagggctgacgggccgactgcgggcgcggttttggcaggtgattggcgccgacctgataccggtcgacctcgagtaagtgaagtcgtcgctggatcaggaaaccagcacctcgactgacctccttgccttcttgtggccttccaacagctttgcgccgccaaacttcaacccaggtgtgtcgaatcggagactgcgctcccgctccgaccacttaccacgccttgcctccggaccgatagagatttacgacgtcctcgacggcctgccctacccgagcgagttcttcgacgttatacatcagcgcaacctgtcgaaatgggtgccagatctcggcgccctcttccacgagatccaccgttgtctgaagcccggcggaatttttctcgtaactgaaccgacggtcaggcgccctctgtcatctggtcgactgaagaaacgtgctgacgacttccgacgtgctttcagaagggcatcttttcccgaacaccgtggcacgcgcctcaccaagtggcgatagagcgcgacacctactaccagcaggcggccgagacgactggcatccgcttcgagcggtctctgggtgcgctcggggccttgctccactttcgcaaattcacagctgactatccgacacgcctctagccatcccgcagctgatagggcagatgtcgcatttttggtcgaaatcggtcgtcctcgacgtcgacatggacatcggagcaacgacgactgaccgtgcgtctctcgaagacgatcattcccccggccgcaaagactgacctccgctttgagttccgtccgcagctatggagctccaggccctcggactcgcgatgcgcgagctcaacctcatcacctgggccttgatcgactctgtccgcggcgggacgattgaggcgaatgccgaggcacgccgagtagaccagcaactcctgccggccgtcgcgggcgggctgtactgtaaggcgctgtcagtcctggcggtgaagggctgatgagggcttgcgatattcgatgcgctctcttgctggatatgggggtcaagagcgagggaccatttcagaagacagagggaaaaggacgagagatgtttctaggaaggggccagcaaaggagggaacaatggagagcgaggccagtattttcagtagccagtgtcgactgacttggtggtgatgctcttgcggtcgccgccgagctcgtgcgcttcggcctcccatttgcggttcgagattgccttcttgccaaaggcggcgtagccgagcttccaaagagcgacgaggacgaggccgacgacggcaagcgtgacgccggcgccgatcccgcccgcctcggcgagctggagcgggtcggccggcgacttggcgagcgcactgttagcggcgctgtcgcgagtcgtgcgcgtcgtctcggtcacattagtgcactggtaggtcgggcgctggtagctgctaggctcgacgagccggacgtcactgcaaaagggacacagaagcgtttcatcagttgctgcgatggatcgaaggagaggcttggaagacgctgcagacgcacgcgcagtggtagtgggtgctgtttttaggcccagtgaagaactctagcttgaaagtcatctcctggccggcgcggaagccgagggccgcaaggtccggggccggaaggcacgacgagccggcaaaagtgtgagtgactgaagaagaggagggtgttaagagcggtgcggcaaggcgatggtgcgttgggacgtacggttcggcatcagcggcgtgaaatcgctgacgagctgcgggtcggccagggtcgagtaagagatctcgatttgcttggcgtcccgagtctggaggagggagaactggcctccggctaaggaagagcagggcacagagtcagcttcggcaatggccaaagacggggtacgggggtcgacgcacagagagggtagtcggtccggccctggaccttgaagccctggcacgggccagtcgacagcgtgtccatatgccatccgcgatctgcctagagttgagggaaagaggagtcagccttgaacctggtgactggcgaatctttgccgaggaggaccgacagggtggatgaattcgatgatcggcttggtcggcttgttgccagactggcggcggtcgaccgtcgatgcggccgagacagccgtaaggaggaggagggcggtaggggcgagggaggcgagcatggtggggagtgagaacagggagtgagatgaggaggtggagagagctggatgaaggatctggaaaagcaacgaccgtcgccctttttgtaccctccgtcttctggccctgcgtcccctcgccccttcgcccaccaggccaaggcccggctatctcatctgatgagattgaaaaaggcggggaaaggtggggggggcgaggttgtcagattcgataaaagttcttggcgccggcggatcggcgcttgaaagcatgcctccctcctctgtccctcaatccgttggcgccccagcaggtcagcgctgaatctgtacagtcaataaggccacattattacctgcgatgaggaagaagggagaggtcacgttcagtcgataagggcgcgcatgcaggccgtcggatgaggccgcccgcggagttttgcgtcgcgcccgaccgaccgaccgaccttgcaaggcgtgcacgccaaggccgccagctcagccagttacgcccgtcggctcgcgcaaccggccccccatgaaccctcttgagagagccgggccccgctcccgaaacgaggagcgcgctgtgctcggctgtcaggatggacgacacacttcctttcgttcagccgccgcgcacttggcgcgctttccacgacggggcggcctgaggacggagcacgaccgacgggatctctcggacttcgcgaagggtcagggttagggggtgctagctccagacgtcctgggaggcgggcccagttttctttcagccgaccgtcgacgcccgtcgtcggaggccaaggtccgtcggagcagtgcactccgcgccggcaacaataagacggtaaggtgcgagctgcgacatacaaatcgggccggaccgccgaccgccgaccgggtgaggaagatgagagaagactactctgccttgccctcgacgacgacggcagcagccggctcctcgcccgtcgtcgccgtcctcggcgtcgccctcccactcgccccgctgctcgctccaacgacgcccatccgctccatcacgtacccctcgccaacgacctcgacgccgacccgaagggcgtcaacgagccgctcctcgacccacgggttcgtctcccagtcgacggcgagccaggcggaggggatcggctgcgattgggtcgtgtgcgtgagggcgtgcgaggggtcgacgaggtgcagaaggaaggagagctggtcgggcacggacgacggcgcggccttgcccccggcggcagaggagggggaggagaagggcgaccggtggaggacgggttggatgcgcaggtagaccgaggtcgagtggacgggcaggtcggccgtcgggcccttgggctcagaggcggttgactcgcccgcggcttgctcaatcaggcgggcgatggacgactgtaggcgcggaaggcgcggaaggcgcggaaggcgcggaaggcgaggggtgtacaagtcagtccagcgcgacgcacgcggtaggtgaagggagacggacctcggccagctcgtacgccttctcccagccctcgaccgcaaacagctccctcttcccctccctcgccgccagctccgcctcctcccccctcgctgcactcctcacgacaagctccccaccctcgacttgctctagcacgcgcgcgagccccttgtagacaacgccgtcgagcccgtcatagccggccaggtcggcagagaggacgatcgagagcacctcgtgctcggcgatcggcggggcaatcgtgttgagcagctgcgtcaggcccgtctgcgaggccgcgaggaggtcgtgtcctgcgaagcagtcgggcgggcgggcgagcgggcgtcaggtcggccggtccggggcaatagtgaacaagcgagtgaatgtcaggcacgacgcacggagtttctcgaggtcgaccccaccagcgacctcccggcccttctcgacgagctccttgacacggcccagcccgccaagcccccacttcctcgcatcctccttgacaccctcgacgctctcgcccggccttagctcagccgcgacgtcgcctagcgacgaggcgaggttcgacgacgcctcgcgctggagcgacgacgcggtcgagcgcgcggcggagagggccgaggacgcggttgaccaaagcgaggtcgaggatgcgccccaggagccccagccgccggcgctcgaggaggcgacgggcgagggcgaggggatgttgagcggctcgttgttgatggaggctttgccggtggccttggcgctcggctcgacggggctgggcgaagctgcagtggcagaagaggagggagggggagcgtccgcccgcgcaccagcgacgacggcggcagcagcggcgggcgaggccgcaggcttcgacgcggaaggtctagcggcagatgagctggtcggtccgcgcgagagcggccgggctacggtcgacgacttctgggtgaggtctgtcagggcgggagagccgggtgggtgggcgtcagttccggcgagttcgggcttcggggcggcgggctttgaggcagcgcgtgaggcgctctctggaggtgtcaatcggtctggaccagcaactggccaatcccgcaccctcgccctgccagagcgagcaaccgatcgggcccgcgccacttggctagagagagcaacgaggagggagggaccgaccgtctaggaacttgagggcgtcctcggcctcctggccgtccgccgccgtcgagtctcccttagtggtcgcagcggcaggcacaggagcagcatccgccaccttgacctgcggaaccgccgccttcgttgccttgctcccggcagccgtcgtcgctgctgccgccgctgacgacgaggggtttggctcggcggctgcggctgacgccgccggctcatcctcgtcctcggacgcgggagggacgtcgtcgacgctgaaatcgaggtcgtcgaggaactgaagggcctcttcggccttggatttcgactttgacattgtgcgctgctggatgggatgggtgtatgcgggtcgtcgggcagagcgagatggtcggtcgagacgcgcctatgcatcctgacaggatccgaacgatgcaccgctggaggcgccctctcgcgcggacgttggccatctcttgcacggtccgacgacgcgccttccctcctctcgacgacccgcacctcctccagcagcagagacgaccatggccgaccagcagcagcagcagtacgacgactcgaccgagcacgaccagccggcacttgacaaccttggcccggccatcaacggcgacgcccagagcagctcgcccggctcgcctcctccgtcagcctcagccccagctccgccgatggcagctcctgcgccttctgcgccggcaccggccgcacccgcacctgcaccccagcagcagcagatcccgcgccggaagctcggcggttttgtcggctttgccaatctcccgaaccaggtccaccgcaagaggtccgttcgtctttcgcccacgggtgctcattgctgttgaccgcgcgcgggggtcaaaacacggcgcgcggagggtagcgacgctactcttttgagtttagcttcggcctgctcgggaggacagacgagtgggcagagggtcggcagcttgcttccttgttaggcgacctcgcttgggagggaggcgagcgggtcgagagagggccggcggcgcagagccaagatggccctctctctctctttggcctgctctagctctcgcaaggagccggcggcgaggcctcggcattcactccctccgcttccttttccgtggcgaggggaggcggatgctcaggcgcgctcgtctttggccggctgcgaggtcgggcgaacgaggactggcgcgctcgggccgggcgagggtgctagagcagaccggaaaaggttgtcacaggcacgagaccctggttgcgcgctatgtcgatcgggcagagcgcagctggctctgcgggcgcatgatccctccctgccgtccgctgctgggtcgaccaattcgcatgaggaggacgctccgctcggtacggcgcttgcaatgttgcagtcactgacgactcctctcctttcctcgaccgtcttcgctctctcttgcttgctgcaaattccgatcccttcgccacgtcctccagtgtccgcaaaggcttctcgttcaccgccatggtcgtcggtgcgtcccttcctactcaacaggccgcagggctccgagcagtgcccagcgtcttgcttccggcgctgaccttccgctttgccccgccgctctcccccttcctcccgctgacgcctttcgccttctccttctcgccgcaggcgagtccggcctcggcaagtcgaccctgatcaacaccctcttctcgaccgccctccgcccgccgcggtcgcacgccccgccgggaaccgagctcgcctcgaccgtcagcgtcgagagcatgacggccgacattgaggagaatggcgtccggctccggctgacggtcgttgacacgcctggctttggtgactttgtcaacaatgacgagtcgtgcgtcccgtcccgcgcaggagcgctttcgtccaacctcaccttccaaacacgcgtccgctgactcctctccttccgcacgtagatggaagccgatcgtcgacaatgtcgaggcccgcttcgacgcctttcttgagcaggagaaccgcgtcaaccggtcaaagatgcacgacggccggatccacgcgtgcatctactttatccagccgacgggccatgcgtacgcccccccttccgttcgcgctcgctcaacccgagatggcttgaaggctgactggcaggatcccttcgctcgctcgctcgctttaggctcaagccaatcgacatcgcctttatgcgccgcctccaccggcgggtcaacctgattcccgtcatcgcaaagagcgacacgctgaccgatgacgagattgtccgcttcaaggcgcgggtgcggccccttccctctcctcccccttgcttgcgacgattgctcgctgctcgtgctcttgcctgcgccctgcttgatcaagggctgacctccactggcctcgaatcctgccgctcgaccagattctcgccgacatcaagcaccacgggatcgagatcttttcggcgccgatgtacgacaacgaggacgaggagacgctcgccgagaacgaggagattgccgtgcggtctctctttgcttcgctatctctaaatgtgcctcgactaatcccccccccctttgtctttcgcccccctcgccggtcggctgcagtccaagatcccctttgcgatcgtcggctcctcgaccgtcgtcccctcgccgcacggcccgtccgccccgcctgtccgcggccgggcctacccatggggcgtcgtcgaggtcgacaacgaggcccactgcgactttgtcaagctccggcagatgctcgtccggacgcatatggaggagctccgcgagacgaccgagcgcggcctctacgaacgctaccggacggagaagctcctggcgatgggcgtcagccaggacgactcggtcttccgcgagatcaagtacggaccctcttgcgctcgcgagcccaagctgcccgtttgcttgcgcgaaaagctgacgtttgtcgtgcccctttgctcagccccgccgccaagcaggccgaggagcggacgctgcacgaggctaagttgactaagatggaggccgagatgaaggccgtcttccagcaaaaggtccaggagaaggagtcgaagctcaagcagtcggaggaggagctctatgcgcgccaccgcgagatgaaggacgcgctcgagaagcagcgggccgagcttgaggacaagaagcggcgggtcgagcagggccggccgctgacgccggaaaagtccagcaccaacaagaagcgcttcggcctcggcaagtaaacacggtccctctcctcgaccaaacccctgtccctgtccgcccgattccctcggccctccacaccttctctaccctttcagtgactcaacgataccccgcccctcctcttcctgcaccgaccgggcccgcctctcttccctccggctcgctcgaggactctactcggatctgcaccttctcatcccactcacgccttcccagcctcgttttaccccgactccccccccccccttctctggacgctgccctatcgattccaaacccccttcttgcttctccgccgcctcgtcgcaccgaaatccgtggtgagagggctgaacggaggtgactagatgcacaaacgtaacggcgagcagagacgaaaggcgagatgaaggtaagagcatgagatgtggagcaggacggaacgttcaggactgctgcgccggtggcgacggcgacagcagcgaggcgatcgtgatgcgccgccggcctggactgccagagccggcagacaacgacgacgacaaggcgccgctgcttagcgatacggagggggagagagatctctcggatcctgaagagagagagagagagggggacggtcagcgcgagggcgcgaggcgaagcaggccgccagaggcagcgcggggactgactgtcgtcgcttgcggcagaggaaggacggaggcgctttgcaggccgcccgaggctctcttccgtatcgcccgttggaggggggctggcagaggccgctcgagctgaagatgaaagcccgttagtcccttttcaaccccggtctcggccattgctcgcgacgcatgacgcaccacgaccgctgggctcctttgtcaggctgtcgattcctgggaagccatggaggaccgaccagagattcggctgcggcatggcagtaatctgtgactcggtcgtcggcggcgccgggtcgcagattacgacgcgtgcctcgccgccagaggacgacgggccagcgtgcgcctcgcccgacgcggcattccgaccgcgcatcgcccgctcaaagctcgcgacgtccatcggcctcgcgcgggatgccgtcgacaggtcggcgttgaccgtcctcgcgggcgggtgaaccttgaccgagggtccagtcttgtacggctggcgacgcgggaggaggtagggttccgactggcggcggaggcagaagggcccctcgtagccgagcgtggcctcgtccgtgtacgtgtcgcgccacttgccgatccaccggcagtcgctcataacgtagccgcggtagagccacttggcactaacggcctgggtgacgggctcgtcattcggctgggagcgaggtatgggcgagagtcagtctacccgtcaggggtgtgagccagactgcaacgtcggcagggaacgcacctcgtagcgcttctcgaccgagagcaggccgtcccaggcacgaacacggccgcgataggtaaattttccccacttgctccggcccgtgcccgtaacgaggagctccttgacccactcgctgtcaggctcgtcgtcgagcgcctcctcctcgatcgggcagggccgcgagacgtcctcgccctcggccggatagccggccatgaaggccgttcctgtcccgccgagcttggagcgcgggacgtagacgaccgtctcggtgagctggatgtggttggcttgctggccgaaggcgtctgaggagcgaagagggatggggggctcaatgatttgcaggaaggggggaagatggcatcgtcgcgcagctgaagggctcacttgtgtaaattgcctcctggtcgccggcaaggacgtcggcgaagccgttgactggaaaaggatgagcagctggattagtctggagtgaaggacgccgagcgaagacgggaaggaagcagaaccgcacagtcaaagtaggcaaacgagccgatccacgtgccctcaaactttccgcgccagtgcgcgaccgtcatgcccctgtcggcgaggctcttgcagagcgtcatccgccgccagtcattgtcgaagctcgcgctccggaggccgaggattggcacgctctgccggaggtacgtgtgcgagatcgggtcaaagtcgggcgtccggcccgggacgtccatggcgagctcttcgggcgtgtagaggaagtcgagcgacgaggtcgacgagttggaggcagaggtcgtcacgcctccgatcgagctaggggtttgcgcatgggagtctttgatcagataggcgcagtcacgtggaagagcgccggaacgtacgggtcgaggtcgagcgagttcaagaggccaaagatggcggcccggccgagtttcctggcagagccacaagcatcccgtcagcggacggtcagggccaggcagagagtgacagggagcggggcacgcacggcggcttcatctcccactcgcgcccgagccgccggacgacgtgcagcggcaacggctgggcgagcgtgttgtcggtcgagctgacggcagcggtccgttcgccgaggtgccggacctgccgaccgccgcggtcgacgtcgcagccgatctgagggagcgagcggatattccagggcgcgacgaagagcgaatactgcggtgagaagaccagcggacggaggatgaaggccttctcctgagcgagcgaacgagcgagattggggcaagagtcggcggaagggggggggggtcagcgtgaaagagcgaactgggcagcaagacatctgggaccaccgacctgcgtctgctcctcagtctcggccgcggcctcctggccaaggctgagcgtctcctgccggaggttctcgcccgcctcgaggagccacatggtaagcatgcagtggcaggcgtgcgaggccgagtcgaccgggaagcccggctccaggctgcgcgagagcatgacggcctcgtacagccggaagacaaactgcggcagtcgggcccagccgaggatgtgcggcaggttgaggccgtctgcgaacgagaaggaccaaggggggtttagcgttgggccggggaaagagggtcgacatcatccatcagctgccgttcgacccgcctaaagggagcggtcggtcgggggcggtaagaaagagaaggggacagaccattctccatcaggagcaggatcacctcgagcatcgtctcctcgagcagccgttcgccgtcggcgtcgtgagccgccagccaagccccaacgtcgtcgccgagggcgcgcaccgtctggaggacggaccaccggcgcttgagctcggcgctctctgcccggacgtcggcgagcgcagccgggccataccgcctgcggacggcggcgaggtcccaggtcgagcggaggatgcggccataaagcgacgggttggcgtcggcgctcaagcaggcggcgagtcgggggtgcgtgcagaggagcgggacgaggtctgccggtgggccgggcgtcggcgagagggcgcagaagaaggcgacttgggagaggagctcgtcgggcagggcgagcagcggcgacggccggctggagcctacagccgaggtagtgggctgcgcggagatgaccattggagggcgggtaagggcgtcccaggcgcgagggtcgggaggtggcgattgaagagagggtttcctggccctggtcgtcgtcgactcggaaggacgaggctggcccgcccttgccttgcttgttgagggcccgggctgaagcatgaggggagcacttgcggacggagcctttgcacaacgcccggccgagcaagttcgaccgacgacgcaagtctgggccccccggatcgaccgaccctcccggccggcacgtcccggccgcagtcgcagacggagacagaaggagcgacccgacgtcggtggaaagacgaccgaccgaccaagcgagcgggcagacaaggcaagcaacggcagcatcagccagccagccagccagcccgcacgacacacaaggtcccgcgtcgtttcagccctgcagaggtcattttcggcgtcgccgcgccgccagacggcagcagctcccggcggaggctgggctcgacgaacaaaggacagcctcgccgggcgaactccacgccttcactccacgccttcccacctccgtctgtcgaccgtccggcaggtaggcctcggcctcgagacgctttttaagaggtgcactttgcgccgacctgctggacggtgatgatggacacggcaacctacgctctgaatccgactccgtgcgcccgcccgctcaggtccccgtccctccagctgatgccgcagcaaagcgagcgagcggcagcaggtaatccctgcgagtcgcaaacacgcggccgcttttccttttcatccgacccggaagaaaaatgtcaggatgaaagggggcgaatactgatcggaggccgccatggatattcgccgccgccgacacgctcgacgagcacccctctaactaccgctggtccgaccaccgctctagacgttgttctcgcccgtcacggccggcgccgcctcgccgtcgccgacctggcctggcgggcagcactgggccggcgcgcactcgctctcgggcgggcagcggatcaggcagtcaatgtcggacgccgaccgcgtcgccgtctcgtcgccgaactcgggctggatcgtcgacgagtggattccgcaggcgtggaggactggagcgcgcgagcgggcgaggaaggtggacgttagcgggcgtttgagaggggggggggcaagcgaggggacgcaccctcgcggatcgagtgcagcgtctccatgtactctgcctccttctcgagcaggacatggaccgaagcgacaacctttgtctcggacagctgccagcagtgcagctgatgggcgggcaggacaaacacgagtcaggaaacatgaactcaggcagtgccggagggaacgagcaggcctcacctcatggaccgagacgacgccgggcaggacgagcagggccgaccggagctcgtcgagcgagatgttgcccgggaccgcctggagcaggatgaacgacgccgacttgactgcgttggtgcaaggaggagcgcatggtcgacgataagtcaggctgcagagcagcgtaagcaaacgagcgtcgagggaacgtaccgagcgggagcgccgaactaaagatgatgacggtgatgataaacgagatgagcgggtccgagtagaagcggtaaggcgagtcgagcagggcaatgatgagcccgctcgcaatgacgccgacgttgccaagcgcgtcgccgaggacgtgcaggaagacgccctgcatgttcatcgagccgtgactgtgccctcctccgccgccgccgttcgaggacggctcggcgccgtgcccgccgtgagcagcctcatcgtgcgagtggccgtgcgaatcggcaccgccgtgcgaatgcgcgtcggcgcccgaggtcgcgccatacgagacgacgtcggcgtacgaagccggggcggcagcagcgtccgagtgcgagtgggcgtggtcgtccgaatgcgagtgtctgtggcgcaagggggtaaagcccagtcagcatgctgttcgcgccgctctgccccacaaggccgacccgggacgcacccggcgtggtcacgcccgtgttcggcgacagagatgagcggctcgcgctcaccgccgtggctctttgaccggcggttggcgccctctgggctgagcgcccggtcgaggccgccctggctgctgctgtccttgtagctgccctggtggtgctggtgatagcccatctgctcagccgtcgcctggacgttggcccggatcaaggccgggtgcgcaaacaggctctggagcgagtccttgcgccggtggccgtcggcatcgatccgcgccgccgctgccgcaggcttgccggcgaggacggccggcgcgctgctcggctcgacggccgtgccgtgcgagtgcgagtgcgagtgcccgcccccgccgtggacgtcgtgaaagagaacgaggccgacaatgtttgagaggaggccgagcgagccgacaatgacaacaacccaggggttggtcacctcgggcaccgtcacgagccgctggatgcactcgagaaagatggagaagcagagcgcgaggagaaagacaccgttgatgagggcgcctaagggttggcaaagacattaggtgagtgtgaagaggggggatcgcagacaaacagcagtcagcgcgcaaccgacggtgggacccgggggctccgggctgtcaggcgggcgggaggcaggacgcacctagaatttcggcgcgctgccagccgtacgagtacttggacgtcgagtcggccgtcgcgagccggatcgcatacagtgcgacgacgagcgagatgacatcgctggggagaggagcagagcagtcagcacgcagggagtgggttcaaccggcgcagcggggaagctagccggtggtaggccgtgacgggcgacgactaacttgagcatgtggaacgagtctaagccgacaaagggagaaaaggcgaacggtcagctcatgtgtcgagtcagccagcccggacggagcggtcagcgagcagcaagggccaggaggagcaagcgaccgctacggccagcgccgatgcctcgatgctcccgtcaagcagcccgtcggcgcgggaggatgagagcaagctggagggacacaccagcgatgagagcgatactgccgacggcatagcctgcgagccacgatgagcaaagggttgatcctggtcagcttcgaggtggagtccgacggagctcggagaggcgcagagcgcgaacgagcttgccgctcttgaggaagggcacgcaccgccgaagagctcgatgaagaagaagaccgagtcgatcacgaggagggtcaggatgcggccctggcggcccatgctgaagaatcccatggcgagcttgggttgaggcgaagggcacggggggtggtggtccagtgctgacgagagggagggatgcgcggaccagaggtttggctgatgcagaacaacaggtcaccctcaagccccgtcggagccgcagcgacgagccgacgaccgagcacggcgacgacgacgaccttgccagctcgactcgccagagactgactacggtaaacaggacatagctgccagcatgccggccttttcgccctcgctgacggcgaatccatgtcggacattcgcctaccctctgccggctaccgccggtgccggcgcctcgggccaaaccacttcgccggccggtcggtcggtcggctgacgaggaggcggtcggcgagtagggccttcaagctctacctgccaacgaacgtcggtcgtcggtgaacgaccatcgaacccaaatccaccggccgcctacatcgagagcataaagagggcccaacatcacgtcgtcttcgctgttccagctcagctcctcttcgcaccgaaatcaccgacaatgcctccctccgcccaccatctcctccgccgctcgctctcgaccggccttccccggcatgtcactgctgcgtccaagccgcccaagaagtcaggctcgatcgccgacgtcttcagctcgctctcaggcgcggccgtcgccccgctcccggcgcagtatgccgagcttaagcgcgagctctggcgggacgggatggccgagcgctgggctgaggtgttggccgccctggagcagacgacgaccgatattcaggctgctggaccagaggtcggtcggaccgtcgggttgcgctccttgactctgcgggagctgacctcatgcgtgacgccgcagatcgtccctcgcctgccgttcgagcagatcaagcggggcgaggtcgaccccgagattatccgctggatcaaggagaccggcaccgtcattgtcgagggcgtccagtcggagcaggtgcgttcgtcgcgtctcaggtcgattcagctcgctttcgtcagactgatcccccacttgcccacggtcggcccgtagcaagcgctccagtggaaggccgacatcctcgcgtacgccgagcagaacaaagcccacgtcaccggctacccggccgacaacatccaggtctacgagctctactcgtcgcgtgcccagcgcgaggcccagacgcacccgaatacgatcctcacccaccggttccttctttcgggtcttttgcatgcatctgacccggcgagtaagattagcttgcagccgatcgtttatggcgacagactgcgcatccgccagccgggtgacacggtgcgtctgtcggccggcggtctacctactacctagctctcatcacgctgactgacccgttggcggcgacgacagagcttcaagctcggcgcacacatcgacggcggctcgctcgagcggtggcaggatcccggtgagcctctggctctcgctcagcccttgatgagcgcctactgagcgaaatctactcctgccaggcttccgcaagtgcttcgcagcgctcctcgacggcacctcgcactggaccgcgcacgacgcgtttgacgtctcgccccgggtcgacgccgtgacggacctcttccggacgggcaacggccagtgcagcgtttttcggccttggcagggtcagccactcgcgcttctctccctctctcttgcgccatgcgccggtgctgatggtgactcgctccgctcgctgcaggctgggcgtcgatgtcgcacacgggcccgacggaagggacgctcaaagtcttccccgcgctcagcctctcgtcggcctacgtcctcctgcggcccttcttccggcccaaatcggcggacccgacacaggcaagctacctcgccgctgcgaactgggagcccgacctcgacagcacggccttccccggctcagtccctggcaacggtcaggaactgaacgacgagacgcacccgcacctccgcctcgaccgggctctcatccccgtgccgagggtaaagccgggcgaccatgtcttctggtcgggcgacacgatccatgcggtcgagtcggtccataacggcagcgagagctcgagcgtcatgtatatcccggccgtcccactgacgttgcagaagtaggtctctcgccgtcccgccctcgtcacgcgtgcgactcactgaccatcgttgcccgctcctcttcagtgccgcctacctcaaacgccaagccgagcacttcgccctcggcctccctgccccggacttcccccaaggccagggcgagtcgctcaacgccaaccgctcgacgcccgacgacattgtcgacctggccgcgcggaggatgctcggcctcgaacggttcgaagaggacggcgccctgacggagggcgagcgggaggtggtgcaagaggcgaaccggatctcgttttgactaagggatgccaattgacagacactggcgcgctagtgcgcgacgacgaggaggaggatggctccgaggatgacgagcgaggcaaagccaagcgtcgccatgtcgagcctgcagttgtgcagaagtcagcctcctaaaaacacagagcagccgactcaactgcaggactgacgcagagagcccgagcgagggtgcgccgcggaggagactgcgcgtcgtgagccaatgcaccttcgtcccggagacgaggacgagagcagagagcaaggcgaaggctaggccgagggggatcgcgagctcgcgctccctcagtcggccgggcgaggtggttcgctgcgacgacgacgagggggtctcagtctcgtgcgctttgtaatggggagaaggagggcacgacgtacgtctggccgggcgccgatccggaagtcgccgatgaaggtcgttgccaggagggtaagcgtcagacagagccgaacataagagagtgcattgcgctccgaggcctgttcgagtagaggacggcggcgggggttagtcgcaggaggacgagggtggggcaggccgggcagagggtgggccgcacgaggtagtccctcgcatccttgctcgagcccggcggggagagctcgtgccggagccagttggccagggcggccggcatgcaggtttgggaagattcagctggcgagactttagtcgtcgtcggtatctgggcatcgtaggttatcagggagggaagaagaggcatgacgccagccggccgtcgttggcgtgacctcgcccctaaccgcctcccgccccctcctcgtcgacatctagcaaccaacgaacccatggacgaccggctgatcgaggtccgtcctctgaccatgcccccgaaaccatccctctcgtcccgaccctgacccctgaccctcgcaggagctccgggcaacccgcacccagctcaactcgcagctcctagagctccagcacgagctcgcccgggtcagggcgtcgatgcagcgcgtccagcctcagctgggcgtcctcgagcagctcggccggtccaatctcggccgactcgctgccagccttggcggccagggcagcagcagcagcccgcctcgtctgcccagcccgatgctcccatcgccaacgccgacctcgccgcgcgcagcaagcacgcttcacctcccacccggccctcgtttccctctcaacccaacggccggccggtcggcaagctcgcccccgcccttgccgtcggcttcggcctttgccgatctcctccagctcgtcccggacgaggaggcgtcggccggacgcgccttcgagccgtcgagggcgagaagggggtccgtccgactcctctcgcgagggcctgacggcacgccagcccggccgtcgtcaagcggctcgacgacggcagacgcctgggtcatcccaatctatccattcagcgaagcccgaagcgaggccatcatgctccctcggcctgcacaggcccgcccggccgagaaccgcacggcagcaggcgtccccgaggcggctgaaacaagctcgtcggcaccgacgacgagacggacctcggccactcgcaccgggcgcgtctccctcgctcagccaggctctgcagccgcgtcgctcctctttggcagcagcagcagcggcggcggcagtgagtcctggggcgtcgacctcgagtctacgaggctgggggtcgacaacctccgcgcggccttcctcccacggacgaccaacggcccgcccatctcgtccgagcgaggccagcaactcccgggcctcggctacgacgatgggtcggctgcggctggtcctaatcagtcgcgcccgcggccgaatcctccccctgacacgagcagcgtcgcttcggggagcgcgatgcccccgcaaccgccggcgccgacgccgacgccgacggccggcgagcttgacccgaacggcgagtcctttgagcgcctgcaggcggctcgtccgtcatcttcctccggaccggtccatcctctgcttgacgtcgaggcaccgcaaagcgaacgccgcgctcgcttaatggggctcacgccgcggccttctgccctaccgcgcttcccgatcgagaccgtcccgccctctccagcagagcctgcctttggcgcccttaacttcgacccggactcgtctgaggcgcaacggcgactcgagcggacctctggcctgctcgaagacctccagcagcggcgcgaacggctccggtcaaacatcgccgcgctccgcgtctcggacctcggcgacctccctccgacggccgacgggcgccgcaacttgcgaccgccagagcagagcacgccggtcggctcgccggcgctcgggcacaggagcgtgagcgcgcgcctgctcgaggcactcggcggcgaggggctcggcgatgtcggccggcggctggcgcaagaggaggagcgcgagagcgcgattgctggcagtcgatgggacggatgggcatcttatactggaacgagcacgtgggacgctgacgagccgcctgacgtcgcggccagcccgtcgtcgtcgccgttgaggggagcaacgagcgccgacgagagagatgcgccgcgccggacgcggtcggttttgcaagcctaccttcagcagggtaacgcccctccgaccgacctcgaggctcagctgcgtcgagcagagcaggaggacgcagcacgggcgacggcggcaccagataggcaggctggagctggacgcttgcctgccggttcgaggcggaacgcgccttggctgctcggcgacggcgggtcgcggagtgcactctcgacgactgagacccggaccggccaagaggcgcgcttctgggtacgtcgcctctgcattctgcatcggaaacccaccgctgacgcccctgacacgccactttgtgcgacagcccggcgtctacggaggcgggacgctcatcttcgtgcgtgtctaaaccttcaccttgccccgctccctctcgagcgtcttttgacatgcgccggttaccctacaggatgtgcctcgcgcgcagatgcagtcgctgctcgaagccagccgcggcggcgctcgagagacctcagtctctgccctccccgaagagcgagtggctggtcccacctctggaccgccctacccctggcggctgcctccgaccagcgcccgccgcgatccactgctgccggggacgacggcgccctccgagcagcggccgttgggccctcggccgagctggatcgaccaggacggcaacgtcctcccgtcgcgccctgccgatcgcccttcgtcggccgagggcgcccaccggacgtccctgaagcgcgacgtaacgggcgaggaggtctggttcgagcggccaggaccggtcgcgctgcctactgcttcgctccggagggtcgagccgcacgtcgcttggcaggctgcgacgccgcttacatctttggacgttaggccagcgcctagtgggcgcagtagtcgtgtcgggaggtagagtatggcggttgtattgtagaatcatcatgacgttgcgtatggccgactcaagaacccaatgtgcatccttgccgtggggcgtgcgactcgtcgggcgtcgggctcggggacgctgcgcggcgtcggccgcccgacctgcagctcctctcgaccacgactgcattgcccttgcctccctgacctcccagagctgtacggacggctagccccattctcgctgcaccctcctcctgaacgacgccgagtcgcccctcctggccgccgccctcgaaaccagctcggtcgcccagcagccccgtgacgtgtccttccgcagccgggcccagcctgcgatctcggccgccgtcttcgctcgtccagcagcaggcccatcatgaagaccgatctcctcgatcaggacgctgacgacgtcgaggacctcctcgtcggccgggcagtgttcgtgcctctgcccgagtcgcggcctgacacgccatggtctcggccgggccccgagctcggtagggacgacgacgacgacgacgacgacgccggctcggccaactcgccgatcgagctgcccacagccgaggatccgcgagagcctggcggtgatgctcccggcggcctggcagacaacgatgacgacctcgaggccaagacgtgtcgcatttgcttcggcggcgagctcgaggaccccgagctcggccggctgttcagcccgtgcatctgcaaagggacggccaagttcgtccacgtcgcgtgcctcgctagctggcggcaagcaagtgcgagcgaggtcgcgttctatcggtgtgggcagtgcgagtgggagtatcgctttgcgcggacgaagattgcggggctggcgacgaaccggggtgcgtacgggaacatgtccaacctaccctctctctcttttcagcgactgaccctatcgcccttcgtcgttacggacagttgccctcggcatgacgagcctcgtcatcttcttcggcctgacgctcggcaccggccagctcctgcatctgatgctcgaccggacgaacggcagccgcttcggcgacgcctgggcgaccgcccgcatctacggcggtacgacggcctttgaccttctgcgcgagtcgatcgccgtcttctcgtcgggcgaggccgagcaggtgctcgaacaagtcgtttcgggcgtcacggccgtctttgcgcccaggctcgccgcgcccgtcgccccgccgccagcgccgccgtcgctcttcgacatcagccgcatcttcgccttcctccgcggaacgacgctcgtcccgcccgttcaagtcgcaccaacgctcttcgcgacgctcaaagaccgcttcttgctcggcctcggtgcgcttgggtcgctaggtgccgtcgggtccctgatcgggacgacggcgatgccgctcgtttcgatgctcaacacgctccgcatcccgatcccgttcctcggcggcggaggtttcaaccgacggagaggcgcgaacggggcgaggcaaggaccgggcatcggcgccgtcctgatcgtcaccgtcgtcgtctttggcggcttcaagtgcgtcctcatgctgaatccctcctgaatcgtacacaccttctcctccttcgctgaatgaccctatcctcctccccctacttcgcaggatcattcaaagcctgcacaaacgcctccgccgaacggccgagtgggtcctccttcgggccgagaatgccgtgctcgacgtcggcgacacgccgacaaagcctgagcctgagcggcagcttgccgaggctcgggcgccgtggttctttgggttccggtagcaagcgaccccctcttcttctcgctcgtcccatcgttcgcgttcaagcccacccgttcgctcgcctgggcccactctcgcatccctcatgttgtagcattgtcactcgagttatgatcactcatcccttcccgaccggtccaaagaagcaagcagatgtacattctaacgccctttaggtctagtcctcgtccgaccgcccagccgcagtcgccagactcggctcgtcgtcgccgtctcggatccacctgcggcgcggacgatcgcttcgtcagttgatcctccctaccaagacgcggagagagagagagagcgaaggtcggactcgatcacccggcttaacttgctccgttcaaacaggacggcaccatgcggggcgttctcctcccaaaggatgcaggcgccggcgccatgcgtcgttaggtagtcgcggacgcgctgttggtgagaagccgagcgacgggaaggagaggaagcaagaaggtaggggagaaaaggagagcgagtcaaaagacggatgtcagcgaccctcttttgcgagagaggccagcaggaagagagcgacgcacaggcgcattgaggatcgcgtccttaccgccgaggaagacggccagccgcttagggtcgggcccgtgcgggacgtccgagacgaagagcgtgttgtgtctggcccggttgcggtcgcggttgttggattcgagcgtgaaagagggacgggcgccgtcagtcagcggccagctgaacggagccgagatcaggggaggaagaggtggtggcggtggtagaaggagagatgaaggcgaggcagaggcaagaggaggccgaggagagtacagaagcgggacgcacgaccagtcaaagtgccggccaatggtgtttgcgatcccgagctcgcccgcgatccagaagccgatgaggagctcgattgccgagcggggctggcggtagagaaagttgaagcagacgtctgaccgggaaggggggggggggcgttaggacgaactcacttgagtcaaagggcaaagagcgaggagcgaaggggatgaaggcaagcgcaggagtcaggggggacggaccgccctcccagagaccttctccatgacaccaacggctacgacgaagggctggtcctcttcttcgccgacctcgtcaagccgcgcgtcattgtccctccgtgtcttgactcgaccctcgatggcggcgtcatgagtaaattggtaagatacgtggcccgcaggcttcaaagcaacggtcgtaatgtcctgctggaggacagcttcggccggactatcgagcctgcagacggtgcgcccctctcgctcgaaggatgagcacttcgactagcggccgacccttcattgctcctagacgccccctcaccatcggcctcagacgaaagtgacttctcgctcgcgtgactgccgcacctcctcatcagccttcgtctacctgtcgcgatttgatgagccgcaaggcgcccctcgcgagcgaatccgtactttactgaattgagagcagcacgcgtgggcgtccatggcgaagggtgcatagatggctgcagctcgaaagaaaccgggacgggcttgtggaacaggagactaggagggactctgagagagaacaggcggcgaggcaagggccgcggcaattttcctcaggcaagcgaagcgaggggagcggccggcatgctagcatcagccttgccgtcgatggggctggcagatggcggcgttgcgctctcgggtgtgggcaggccggctcggagcgggttcctcgacggcctatggggaggtgcgaaggccgtcgagtaagagagggccggaagaaggtccgcgccagaggtctttgctgggccggagagaaagcttgggccgtcatctgcctcgattgagtctagtgagaccgaagaaggggagagatgagcgaacgaaggccaggcggcgcaatcaggagccgaggctgagcgcaccgtgggagaggtaaggtaagccttcgaagcttgagctgtcgacctcctccccttcgccaccgccgacggcgtcgctcgccctccgctggccaaacgtgttgacgctcgaccgtctcgcaacctcggcgagaggcacgtcgtcctcctgacggccgtcgatcgcggtcatcagtcgcccaaagaggtcgaccgccgcggaagatgagggctcgtaggcgactggggcgggcgcgaatgatcctggcaaaggcacggtcgatgacggcgagaggccgtcgacgtcgatcgactgcgtcgggggggtggcaagcccatctactgcaccagacgaaatcgttgtagttgtcggctgctgaaagagaggcggcatgccagacgtggttgggctgaggctggccgcgcgacgcgaccgccgtcgggcgctcggactctcgaggttgacggccgagaggtcgccgcctacttggtcggctgaccacgtcgccggccgagaggcctcgtccttaatcagccccgcccttgatgcgacggtggcggccgagtgcgagtcgttgagcagccctgccgaccaggccgagccggggctttcgtcctcgcgctcctccgtctcgaggatgagccccagcatcggtgtagccgcgaccggtccgtcgaacgtctggcaagtgaagccgctgagcgagggcgtccggggagaggggttgagcgagctgtccgactcgccgtcgtcgtcgccgccgctgctaacatcatgaccaaaggctggcgcctcgtccgggtcgagcaagtgtcgtcggctggccgcgtcgcggtcgtcagagtcatcgtccgattgctgcccggtcgcctcgagctcggccgccagttccgccaagttccattgcgacgacttgaggtcgagctcgtcgagaaacaggtcgggaatgccaagccccgccggcggcaagtcgatcgcgactgtgtagtcgggcgaatcgatgaccggcgacgagtctggcaggccagacgaaggctcccggctgagtggtgcggagcatgaggcgcaacacgccggcgcgagggatgcagccgttggtgtcggggcggccgttgaggcaacgggctgcgcatgcgtgatgtcgagcacgtcgtattcatcgctctctgcgccgtcgtcgggctcggtggcatgcacgggctgcgggccggcgcgtagaggtggaagaagcgtcgccggcagcgggggaaccgacagcggcgcctcgcttttatcgaccagggacctcctcgtgctgctgctgctgctactgccggcggctgcctgcgccggtacacgaggctcgtttgatttcaccgactgagacgaggagattgaccgtcggctcgagggcgagaccgagcgcaggtagggcgtcagactggcagtcgacgacggccgcggcctgacttgtcgttcgagcgagcgagccttgccgtccacgacgacgacggccggcgactcgactaggcgcggctttttgccgacagtcaccttcgaaggaccggcgctcgccgcgttccaaggatgcgagcggaactctgccgaatcctctgtcgagctcggcgtcgacggtgccggggatgggggagtcggcggcagcggtgggacgggagtcgccgcggcggccgtcgaccgcgcaaccgggttgagctttgcaagcaggctgagcgagaaggacgagcgattctgccgacttcgggcagggagggcggtcgccgcggccgatttgaccggcatcggcggcggcggggttactcgctccttctccttcgcctcgctcgaccgggcctcgccgtagtacgcaaacgacgcgatcgaccggacgtctggcagcttcccgccgggaaagacgtcgtcctcaagcagctcagccgagagcgagagggcgcccgtcgaggccgcgaaccggcgcttcttggccgcgaggagcgtgtcgcgccgggaggtcgtcgttccgtcgagtccgcgcgctttgcccttagcattcgactttcgaggacgcggcacggcaggcgcgagatcgtcgtcgttgtcaaaggcgctaatcgctcgtgggctgttggcaagcgcgagtggactgagaggaggctcgaggacggcgccgagcatccggacgcccgtcgagctcggcgacggcgagatagcgacgaggacgggcgtcgccgcgcccgagtgcgggcccgtgtcgaccgtccggcgctcggcgtgctgaatctcgtagatcgagagggcgccgtcggacccggacgaggggccgcctcccccgccgctgccgccgccgccgccgcttccgctgctgctgctgggcccgcgggcgagactgtacgacgtcgtcgtcgtcgttgcggtcgacgccagcgagggcgagaatgaggtcgtcggcgagacgtagagggcaccggacgaggctgacgacaggaggggggcgacggcgaggccgatggctgcctggcgagtaagcgtcgaggtctcggtctcggggaggacgaggagcggcggcggtgaggcgtgtcggtctggccgggcgaaagggtacgctgcgaagcctagaagaggggtaagatgagagccaaagaggtcagcggaaggcgaggaacggcatgcaggaaggagaggcacccacgcttcgtgggcgagtagtgctgggcgggctcgtgatgcgggtgctgcgggatggcgagcgtggccatggcacgagcgagagacgaccccgagctcgctgagagtgcaggctcggctcggctcgttctgaaagagatgcgctggatggagaagagagaggcggagaaagggtcgccggcgagggcgatagagcgagctctgtcaagaaggggcagcgaggagagaagagagagagagggatcgatgcggccaaagggcccgagcgaagggcgagagcgcctggttggtcgaccgagcgagcaaaggaggcgttcgattgacccgacgccggaccaagcggaacggcggccggggaggtgcggttcgctcctcccggtcgactggtcgggttgagtgagcgagagctcgggcgagacggcggccgcgccgatacgagctcttctgggtcgccgtcatcgctcctccttggcactctccaggacgagcatccagcgtcagtcgcgccgtcgctcggaaggcgaggtcagcccttgcgaccgagctctccgctcagcctccggacgcccttcttcgcctcatgggcgcccagcccggtctgcttgtctggcccgagccccttctcgttcgtgtggcgctttgatccgtgggcgggatttatttgctggagggattgctgccgtcggggggcgtgagctgggcggggagaggtcgaggcccagcgcgaaggcttgacctgcagcgatgcatcggcgcagcatcagacgctccgggcctcattgccgaccccgacacctctgcagcacggtagaccgttaaggagccaacacggacctcgtaactgatggagaatgagagatggcgcggcttgtaagggctctttcaaagacggaacggcgagaggatcgatgcctggccggcccgctgcatctctgcggggtcgccctcgtcctcgccggccgccgcctagaccgacctccttgccttgtcgcatcctactctccatcatcgtcttctgccgcagcgccagtcctcctcaaaggcaacttcttcctcaacagcagtagtttccgacctcgtcttctttagcctcgccatgtccggctggaagctcggaaagagtgcgtcctttcgctcggagcacgcgcgcgggcggccagcttcgcacgcacccttcctcgacctcgctccggcgtccatcgcagcgtcgtccggatttcagctctaagcactgacgctgttgacctgcattacttggttcactgtggctcgctctactgcagagctcaaagagtcgcccttgctcggctcgtcctcgtcgcactcatcctcaaacgcctcgccggcgtccatctcgcgcgcgacgaccccaacgcccggcaaccccggctcctcttcctcctccttagcagcaacagcagcggcagtggcagctgctaacgcaaggaacggcgatggcgggagcaccatctcgagtggctcggctgggccagggacggctggcggccagcaggcaccggcggcggccaggaacggcctgctcaagatcaccgtcaacgccggacgggatttgagcttgccggctggaggtttgccctttgtccctctgacaggccttaccgagcttccttgcgcgaaccggtagtgtcgcccttgtccctctttgaggcaaggggccgacaactgggctcagcatcgcgccgccgtcgagctcggaggctgacgtccgcctcctctccctggtcttcctccttcagtcgccctcccgcaagccatcacccaagccctgaaatcgcactcctcctcactctcttcctccctctcagcctcgctctctgccgcgagcctcaaccacaacgctcagcagcgcaagccggcgccggcgtcgaaccgcgactcgctccagcgcaagcagtgctggtggctgccttacgtcgtcctcgagtttgacaagaacgaggtgctgattgagagtctcggggcgttgcgtgcgggcgagggcggctggaaggagcccgtctggcgctactcggcaacgttgtgcgtccccccttcgccttacgcaccgcagaacactccctttgatcgctccgtctgctgagcaaagtcgctgaccgcttcctcgccactgccgttttcagcgacgtctcgcgcgcgtccgaaatatcggtcggcatgtaccttcgctcgagcccgccctcctcgaccgaggagactggcatgggcaactcggacatcttcctcggcgggatcaaggtcctgccggacttcaccgtgcgtcctcggcttccttgattgaccggcctcttggtcgagcgggagttggcgtgctgactccgtgctctgcttgccgacgtttgctcttgcaggacaagccgcattcggacgagtggcaccaggtgacgggcggctcaggcgaggtcaacgtccagatccagtacaaggcggcgcagaatgtgccgctgacgattgacgcctttgagctgctcaaggtcgtcggcaaaggctcgtttggcaaggcacgtcgtcgtcaacgtttcctgctcctcgcaggcaggccggttggaatgctgacgccaacgtgcgctttccgcgctctgtgacaccacaggtcatgcaggtccgcaagcgcgacacgatgcgcatctacgcgctcaagacgatccgaaaagcgcacattgtctcgcgctccgaggtgacgcacacgctcgccgagcggaccgtcctcgcacaggtcaacaacccgtttatcgtccccctcaagttttccttccagtcaaaggagaagctctacctcgtcctcgcgtttgtcaatggcggcgagctcttccaccacctccaacgcgagggcaagttcaacgagctccgctcgcgcttctacgcggcagagctgctatgcgcgctcgagtgcctgcacggcttcaacgtcgtctaccggtgcgtgggcctctctctctcggccagcgtgggcggtcgctgactttcgacggctgcctcttacgactttgtgcgcgcgcgcgcgcagggacctcaagcccgagaacattctgctcgattacaccggccacatcgcactctgcgactttggcctctgcaagctcaacatgtctgagaccgagacgaccaacagtctgtcccttccctgtctgcggctgccgtctcagtattcggctcgctgattcgctgccatctggtctgcctcgcttgccagctttctgcggcacgccagagtacctcgcgcccgagctgttgtcaggccacggctacaccaagtcggtcgactggtggacgctcggcgtcctgctctacgagatggttcggccgacccgtctgtgctccccgctcttcatcctcgcgactgacttggagacgccccttcgcacagctcactggcctcccgccgttctacgacgagaacacgaacgagatgtaccgcaagatcctccaggacccgctccgcttccccgaggaggtccactcggacgcccggtcgctcctcgtcggcctcctcaaccgcgacccggcccagcggctcggcgtcaacggcgcgagcgagattcgcaaccacccgttctttgcaaggcacatcgactggaagaagctcattggcaagaagatccagccgccattcaagccggccgtcgtgcgttccctctcctctcgctgcctatccgccgctgctttggccactcttgctgacccgagccctcgccatcgctctcgcaggcgagcgcgatcgacacctccaactttgacgacgaatttacgtccgagctcccgatggactcggtcgtcgacgactcgcacctatccgagacggtccaggcccagttccacggcttcagctggtccgtttcaaacctgagcgagagccagtagggaggcgacggcgacgacgtcctggcggcgtgtctcgctgggcggcgctggcgagcgtcgtcgcccggtagcgctcccaggcctgtccatctttgcgactcttgatgagccgttccccgtgtcatgccgctccggcgtccgtgaacatgcgacctcaccattggctctctagcagatcttgaacggcgccgtgctgacggctgaccctcgcgccctcctatcgctgaccgccccggcgcgcgcgtcgaaggaggaggggggacaagggcgaaccgctatcgctggaaagaagggacgtcgtcaagcgggaggcatggtacaaggcccgaatgacaacgctaaaacagcgtctaaagggggagaggcgccggggcgaaagcgggcgaaaagaaccgagcggtactgacatacgccgattagatgctggcgcaggcgccctttcgacacgtcaggcccggaccgaagtgcctgtggtccgagcagctgagaagagacggccaggaagcggacgtcagtgggcgccctgtgccgtccgacgaaaaggccgaccgcagacgagagaggattcactcgataccaaccagagagagtgaattggcggacgattggtcgagttcgtgccgacggcgctgaacgcgcgcggcgagcgacggcgggtcgaggtcggtcctggacgtgaagacgccgtgccggtagccgcctcacgactcgagctcggtcagggtgtcgatgcactggccgcagacaggtcagccattcgtcgccgttgggcttgataaggatgagaaggggcccacctcgtagcagtcaaccgagccctcaatcttgcaggccgtcagcgaggccgggcagagcgacgtgtcctcctcggccgcacgacggcgagcggcagcacagcggcgaccggaagtgttcgacggctcggagggcgatgctactggcggcgggatggcgcggacgtagactttgccgttggttgtgctgcagtcttgtttgatggtcaatgacaacgccgtcacgcagacgcagaggacggtcgacgtgtcccttctgtagtaaaacaccttcacaagtgaaaacggtgagcgagctctcggacacggcggccacagcggagtggggggtcatacctcaatattagctggacaatcggcggcacagtcgggcggcgactggatggtgctcaactggattcaattgttccaaaagaaggtctcgcttccttggcctatgatagacatgaaattatcttttggtcagtccgaattattggttcactgactgcgagctcccagtactgaccgaaacttgccgtgccgcagaaggaaccgacccagcccgctggagcctctccaggacacgtcgaggagccgacggtacggagcgcagggacgagagcagccgctggaaggccgccgatagcgagcgacacaagggcaacgaggctgagaaagcttctggcggcggatggcatgctgtgaagtggaaggtgggtcaggattgagaggaggagggggtgagggagaaaagaagaagaagaagggtcggtctgcctgccgttgagccgcccttttcaagccctgccgatgtgccgccttcctctccttctgggtccatcagcgacccacggccatgctgagatcaaagagctcggccacacagaccgcccttattcggcgaacaccgtcctcgcctttcggcggggaggggtaaggttccgtgaaaggggcgcgttcgtggcgtcgccgcgcagagagggccggccgcgcgcgtcgcacgagtgtttgggctcggccgccggaaggtcgaggctgcagacggacgtaaagcattcagctagatcctcctctgcttcaggtagacgactgctcgacagagaccgaggtcgcaagcgcgaagccttcgtgtcggtaaagagcggcaggaggtcgctctgtcgaaaccgagagcttttagcatataacttgaagctcgcaagacgaggcgggcggaggctcggcgcgggccagcaaggcccaagcccgtcgtgccttgagccatgtcccacgcctctccgccctctcgacgacaggcccagccgccggttcacatcccagcactgactcctgcctaccccttgggcttgcgccggccctcggacggaagctgcagaaagcgtccctccgccctcgggcagcagctgcaggccaggccaggccaggccagaagcgcaggtccaatgcagagagagggccgcaccggtgaccgtcagggtcgttgcctgcttgacgacaggtggcaagcgacagctctcactcccgacagccatgaccctcgttggtccagacgaggcgagacgagagcgaccgggtcttgctgatgctggcacgccatcgtcgtcgccgacgtcctgtcgacgcaagactggcaagctgctttggctcgacggcggctcgggccgtcgtcaaggctgttcaagacgtgcgtcgatctgctcgcagtcgtctcggtcacttgctcaagcgagcctcggtggggaggcgacgacgtcggcggctggcaatgtgtgcaagaatctacatagacgaccgtttgtggagccggtcgggcgctatcagtcggagcggccttcggaccatctccagcgccggagcaacgactctccggcgtaggtgtccagcgccgctgccctgctaccggtcgccctttcttggtgccctgttgcagacggaaggcgtgttgcttccggaacgacacgacgtgagcgtacttaacttgcctgatcgacctgtcgctcaaggtcttgcgccagccgaccgacgggcagctcggcgatcgccgaggcctccgcccgacggctccgacggttcggacaaacgactctgaccacgccaagcgtcgttcaaacttcggtagccatcttctctagcccccgggctggccagctagggggcatataagggcgggctgacagtacccggccatctcgttctaaccccccatcaactcaccctgccaaccgctcatcatgcttccgatttccttcctcaccaccagcctcgccctggccgccacgtccgtatcggccctcagcctccctctcctacctcgccaacaatcgaataacacgacgtcgagcgaatttggctggccgacggctgtcgaggccctcgtcaggcccaactactttgatggcgtcgtcacgatggagaccctggccggccagcagaagttcggcgccgtcgactactgccgcgaggtcaacctggtgagacgccctgcctggagcgtctctcgggatggtctggcgctgactgcgagccattctgtcagacggccggcgattgggtccagcccggtcaaccactaaatgtctcgatcgtcctcgtcccgtgccctgtcaacaacggaacggtttcctgcttccgggtcggtaccagcctcttacctgtgctttgccttacgccgacctcaagctgactcgtcctccctcccatccttcgcagtcgaccactctggccaccaacgcggaccccaagtcgactctcacctggttcaacgacatctatactaatgtgggctttgccttcattttcgagcagcagaacggccggacgctcgcccagctcgtgacgaccgttccgcctagggttaacccgggccagtgcgatcaatcgcgcctcgggcggcccctccgggcagagtctctcaccggcactatccagggcaagctcgagccggcggccggtagcgccggttacgcgtcgtaccatgtcccaaaagccctcgtcgtcctgacgatcggcatcactgcgctcctttggtcgtgaccgagggtcggctctaccattacatgctctttgtacatcgcagagacatcgcggaaagggagatgggttcggtaggaaagagtctagcgcgagctgacagtcgctcggcggccaatctgcttctggcgcgagccttcgcgcttggccgcttcgtcctcctcctcgcgggccttgcgctggcgctcggcctcctcggccaggagctcttgcaggtaggcactgggcgcttcgccgcctcctgagctgcttgcgttggtgacaaccgtgttggagcggccgcgcgggccctttggcttgacagcccgccggccgccgggcgagtcgttcggcgacggttgcggcggcacaaaggaggccggcgagaggggcgagcgtggcccgatgggccgggcaggagcaagtgtcgagcgtctgggcggtgtccgtgacggaaaacgttcttcgactggcgagacagggtggctcgacgcgcggaagggctcgcggatcgagatggatcggcctgcaaagcgcgaggtcgtcggcgacgatggtgaggggctgaaaaatgagagtggagctatcagcagatgcgtcggtacaagaatcttcgggcgaggacgacgtacagattcggcgacggcgaggcccggggcttggcgaggaagtagcccttctggccggtcgagtcggccgattgggcagaggccgggctgagcacctgctgctctgcatcggacccgacagccgacgcggcaaactcttcatcgagcatttgtggcgagtcgtggagagcgaccggtccgttgtcggtgcagatgaagaggtccgatgcgccgagctcgcccgcgccgccggccgacgtctcgagcgagcgcttgacgtcaaccgtgtcgtccagatcgagccggctgagtggatggcgtggaagccagagcgtcgttgcgagcgcgtccatgtacggcggctggtacgagtatcgccggtcgtcggccggcgcgtcggtccagggctgcggcccgacccgcggacgaacgagggtgtcgatgatggcctcctcgaccggggcatgaggcagtcctgggcggtctgaggacgccgcggcgaccgtcggcgagccgtacgtctcgtcgatcggcgacgggcgctcgccgtcgcacggcggcagaaagcgagcgtcgatgcgatccaggatggggtggaccatgtgcgacgacctgcggcggcggagaagagaggttagcctcaagattggcgacaggcgctcgcgaaggaacagagagcaacgcacatgttgtgcatgcgccgcgacagcgtcttgcgccgagtcggcgtgtggcccacctttgtgtggacgctcttgttgtcttcgtcactctcctcgtcactcgccgagaaccggagcggtgcgagcgagagcgacatgcggttcgccgccggcacgttgaggtagccgccctgcttgtttttgcgcgtcttcttctgcagccgccacgcgttgaacatctgggcgttgactggccggaccgccgtgggtgcatgagggtcgtcggaagacgaagtggagtcggaccgctgcaggtggcacgaggcgccaggcagcgacggcaagggccggtcgaggtcgacggcgcgcgtacgctcaaagccgtcgacgatgccctgcgagatcttgaagagaccgtcggcttcgtgctgttccagtgccgcgaagcgattcttaatcgcacgagtcaggctgcataggacgaggaagacgagttagcacgagctgcgtgacattggccagagggtcggcgtacctgagtttgatggcggctgtgatgatgacgagcaggacgctgacggcaatcagcggcggcttgttgaggatgacgctgagcgccatgtagacgatctgagacgacaggtgcaggtgatgttcagtcgcggagctccccgaggcatcgagtccatgagaacaaacctcggttaagatgagcccgtccagcgtgtagcgcgtgaagcggatgattggccgtagaccgccagtgtcgtactgcgactggtagacgtggatgaactgattcttgaggacgggcgcggcgacgatgaagtagatcgcgccaaaggggaggacgagagggttgaggacggcaaaaaggttcgagatgaacaggacggtgatgtggatcgggatcaagtagtaggcctgcgatcaaagcatatcggacgtcagcccgtcgactcgaattttacctggatgcagggggtgctcaccgagaagaaccgcgggttcgtgccctgtgtgacgcaagggttggtcagacgcgggcgcgaggacggccgtaaagtgaaagccactcacagcgctgcgtttgcgcggggcgagatccttccggcgagcaaagatccactgcagtatcggcaggccaaacatgccaagctcgaagaacgagtggagcgaggtctcgaggatgatccacagcacgaaaaatggcgcggcctgagggaaggacgaggcgatcgtctcgagcagaccgatgctgacgaccttcctgtgtagagcgcagcagacgcacgtcagcgctcaggctgacgtttgagcggcgaaaggaaggcgaacgtactcgaagttgacgatgaaagcctggagggcggccgcgccaatgcagaagaagacgacgacctcgcagatcaagaagcggtagtctggagaggccgaccagagtaatcagcgataggtgcgcctagggcagggcgtattcgccacgcacaacgagtgaggatgacgtcgtgcagcgcgctctttgtgacgatcgtctcaaagtgcgtcgagatgagaaagagcaggagagggatgaggagcgtcaagatggacacgagcagtgttctgtcagcgtcgaaggagagatgccgaggagtcagtacgctggtgcaagtcgaaggaaagagtaattgggccgacgggatgagcgacgtcgtcacttcggccgcccgcgaatgcgtgttgagcgcatctctgagcggcggcaggatggtcgcgagattcttggcgctgaagagcgcgacaaagaaggtgagcgggatctgcgacgagaagaagacggcgccaggtagatcagcagcaaagagcggtctctctggcgcggtgaatcttgacaaaagcacgcacgaccctgggcagatgcgaggcaatgaaggacggcaggatcagtgagagatcgggcacgcagaaaggaaaggaaggagaggaggcataccagaagatgatctgcaaagggggccgtcaaggtcaatggtcgtcctaaagccgcgaagacgcgcccgagcgcaagacgtacgaaggcccagacggcgatgctgacgaggtagcctttgacggcgtcggtcctgaactccttcttcatcagccggaactaaattgggcagatgggttcgttgagtcagccacgtgctcgaaaatcgcgccgttcgtgaggccgacccacccattcgatgtcgcggtagtcaggcgccagcgcgacgttgcagcagagccgacggctgtggtgccgccccatctttcggacggcgagccgcgcaatctcgggcgagcggaaagtgatgaaggctgaggacgacggcgtgtagtcggccagcggcttggccaggccgtcgtcgatcgccatcgagaggagcgcgagcttggcgctcaggtagtcgatctttggagggttgggcttgcgccggatgaggactgagggcgagagagggccgtagcgccggggctggtagcggtccatcagggcgcgcgggagcgcgtgcaaggcctgaaaacggtcaaggatcaacgttcgaggtagacagaggagtacaagcgggagagaagggcgtaccgtccagaagccgtcctcctctgggtcgaggaagcggccgagcgcctcgtcaaggatcgccatctgctcctcctccgaccagtcttcgcactcttcctcgccgtcgccggaatcattctgcgcaaacgcctccttcccacaccggagcttctccgccgcgagatcaagctcctggcccaagcgcgtgccggccgcgaagccctgctttgcgcgccatttcgcaagcgcgccaaggacggttcggccgagctcgacgtgggcgtgctcgagcgcgccgaggacgttgatccggcgctggcggagcttgtggagctcgagcatccgccggacgacgacgacctcttcgacaatgctcgtcccgctcgcgcagccgtcctcgccgtcgtcctcgtcgtcgtcgccatcgctgttgccagcactgtcgtcgttcgaccgcctgtcaggccgaagctggacgacgtcatcctcgacctcagcccccgggccagacttgctccctccaaccaggttgaccgacgaccggcgcgactttgcgcgagcctcgccgatggcggcgcgctcgcgggccttgcgcgcccggcgcttgaggacgctccggaggccgtcggcgaagtaagctgtcaggcaggcttggtcgcgcatgtcgggcgggatgttggaaacaaggaccgtccgctgcttccagccgcgcggggcaggcagggagtcggtcgagtctgggtgggccggccgggtgatgccggggaagtcgatcggttcgaccatcgggctctcgacgctcggcttggggtcatcgaggatgatcggaccgccagggaggacagccagggggctcggcccgcgaaccgtcgccggcggcataccgtccatccgagcggcctttgcgagctgctggtgggcctcgagccgcgcccgatggagcgttgactcgaccgcctcgcgccggtacttgattccgccccaggcgatccagatcaggcaggccgaccaggtgccgacgagccaggcgatcaggatcgcgtggacaaacgtatacttttggccgatcggcgagcggacgagcgacgagagcgaggcccggagcatcgagttcgaggccacgtcggccggagcaaacttgaggtgaattggcaggaggactggcagcgtcgtaaagctctgcagcaggaggtagtagtctacgacacgtgcggaaggctggttagcagccatcttggagcagacggcgacgcatcaggagaggactcacagcagcagcggagatagcggacgtggacggtgtggtcgaggccgcacatgcgcgggagctcccgctcgggcaccttgatggcgtcccagatccagacaagtggcaggcgcgacatcagcggcgtcgacggcacggcccagtgccgggcttgatactgcaagttgaccgggcgagaggagagacgggtcagctgatgctgcgcggagtgcgcgaggtgacggcagacaaaggggagggggccgaagcggctgcgccaccagcagcatcgccttgccggagtggcgcgagcgtcactgcccttggcgcccttcagtgccacagcacaggtcgaagcctcttctgcgccgctccaggaggccggaaagaaggaagcaggagctgatgaacgcacgacgtagccgaactcccagctctctttggcatgcccgccgccggtcgacgcgccggtcgacgtgaagggcgacccagccgggtcatcgagcggcttccaccagcccgagcgtgagccggcctggctcggccgtccgcgctggcggggtatctgacgaaggatttcgaaggcgacgaggcagactcctgcaggcgggcgggccgagcaaggggtcgtgtgagagagcggttcagccgggcgggtcgcgcgtcgagcgggccggcatcttgggaggcgtcgcctggggagccagaactcaccggtgatggcaagcgagacgtagatattggtcgccaggccggaatagttgctgcgaaacgagtcgctggcgtcagtctcttgaggcttcgaagggagagaggaaggcgggcgagcaaggaggcgaggctggtggctgcgcccgcctgccggcttgaagaggccagtcgaagggcggctggcggaaggagggtgagggctgttctggactgacctcgagtacttcttgtcatcgatggacgccatgtctcgcagtctggcgagagcaggaagggcgggcgagctgatcgtgagaagaaggcagcggctgctgctgttggccgacccggcgagtgttgcggccgcacgcttcgatcgccgcgccagaacaattaagcaggcgagcgacgaggggcctcttttgcctttcagactcgcagttggaactgctggcgatgcagagcaggatgagctgcctctgctacgtgcctctgcctacagtacatgttctgattctgacttgatcatcagctggacgagaatcatgtccttccgccggcgagtgaacgcctgcgcgccgctcctgtcacctgctccagcaggcagaggccgtctccccctccccgaccacatcaccctctcgctcctctgctctctacagtcttctcccggccagctcactcgcatccgaacctccttgctcctagacccggcatcctcgcctcccttcctcgactcgacagccgcccttcgcgcgccccgccgcctgccgggcctcgccatggctcagcctcagctcgcacccgccgtgctgcccccgccagcgccgccgcctccgccagccgccgacccgacctctcgcccaccaggcgcagcgccgacgacagcagcggcatccagtcgagcgttcgtccggcgagcgagccacaagggcaaagggcgggacgaaggctcgaccaagcagcagcggcctggcgggagcttcggcagcagcccggctgacggcccgaactgttcgtccttcctcctttcgccttcgccaggtcgaccgaccacccagaagtcacctctgtccggctgctgaagtgttggaggcctgaagagacgagtgactgacccttgcctgactgcccatcgctcttgactttcctgcagtcctccgacgagcaggtgcgcctcctctctgacgctcgctctctcctggacggctccatccgaccgcgaggaggtgtgtatgcgccctgagcctgactccgaacccaatcttacttgtccgacagtcgacaccggtccggtcgccgagggctaccccgattgctcgcgtcagggcaacgaccgcttcacgtgcgtctctcagacaggggctcgcgcgcttgcgaccgagcgtcaagcaggctgacgggcttctcttgcgtacttgcagctgctttccagagtccaatacaacggtcgtacagaatgagtgcgtctgccgcgagtcgccattgctggtgctagcgtcgactcctctgctgactcgctcatctgccgcttccgctcgctaggtggagcaaggttcgccactccccatcggggaactgcccctgggacgagccctcgttctgacgtctaccttgcctacccgtgctctgttcagctcatctggaacgccaacattccgagtttcatcgcggccgacaaccgggtcgatatctacctcttcctcgcctcgtcggacgcgctcgtccagacctggacctcgctgccaaacgaagagtcgcagctcgcctttcagccgacgagcagctggtgggagaacgagtatggcgccggcgacctcgcgccgggcacgaatcggacgtgggactcgtactttctcgttgtcccaggcggccagccgctcgtcgggacagagtcgcaccagccgacgtttgccgtcgttcagacggccctgccggcgagcgcgagcgtctcgcgcgcatcgattgtgtcgacgagctctctcgctggcttgagcaccgtctcgacccagtcgacggcgagcgctcggagcgcgagtgccagggcgagcatcagcagcctgagcgagcgcattaagacggatccgatcgccagccagagcgtcgccgctaacggtgggctcggcaacctccaaggcggtggcgacccgggcaacggcctgcccaagtatgcggtgcgtcccttctccgccagaattcgcaaaggcccgctcgctcgtgactgacgtgtgttcctgtcgtccgaacagattgcgctcctcagcgtcctcggcgccctgctgctcatcaccgtcctctgcctgacctggttccttcttcgccggctgcacaagcgccggctggacgatgctaccggcggcgacaagtacggccagggctcgccctcgccctcgtttgacgcatcctttgcctcacggaggcccatcatccagtcgtcggccgctgctgcggctgcagcggcgggcggagcggccgttggtgccggcgctgccaatcggggccggtcagacagcgtggaccctcaggcgccaacgagccccttcgggacggcgacggacgactcgcacgccgctggcaccgtcggcggcagccgggtcgtctcgcctgcgccggcattcgtccctggccctcggtccgtttcggctcaatcctcgcagcagtactcgacggcgcccggcgccacagccggggctgcaggtctcagcatcggagcagcagcagcgatgcggccccacccgtcctttgcaacgtcacccctctccgagtcggacgccgcctccatctcggccgcctaccgctcggcgctcgcccacccggaatttgggtcggtcgaggacggtccggtcgactcgagcgagggcgacagcccggcggccgccgacgacggcggcgagcgcatgcggcgcgagctcgagcgcgaggggatcggcctccggggcgtccctggcggcaggggcgggcagacggtcgactaagggctgtcatcgagtcactttcgcccgactctcaccaaaacgctccgcgccgcctccaggtcaagcagcgggatccgcctcttcttcatctcctctcattcactctcgcaacatggtgcactttcaacgtcttcgctctttccaccttcggactcgctttctctttccatcacgactggatcttccccccgtcacgatctgcaacgacccctgcccttttcccacccttggacactctgccattctcccctttacggatcgacgactgagtcgggtgctcttctcccgtctcactgtcgcatccttcgacccgctcttctctcccccggcgcagcgcaccgcttccgtaaacccctctctgcctcctagtcgtccaaactccttcctttcctgccccacagacccttctctcctgctcccatcaacttcccttaatgccgtcgcgcagcctgctgcctcctcggacactttcccgcctgctcactcgtcgctttgacctcgtcgacgatgccgttcctcgcttggcgtccttaaaggggcaagaggctggtcgatcgcacatgcaggcttgagcgacgtgcctcggatggaagcgcatgagattcaaaagatggctgaggacgacgagcagggagattctgcgcaggatgatgggccgtggggtcggccagacggaagatgacagcgcctgcagaagtggacgcacagtagtcgggcttgatgactcgtccaaggccgtcctcgagcttcatcttacagcccccggattgaagtttgcgggcaaggcgtctgtaccgagcggtctcttcgtcgtcgaagaagcgcgagtctgcctcgggggacaaagcgtgggcaagtcgacccagaggtctacgtcgtaatcgtcgtcatcgttgtaatcgtccccgatcaacaagggaaacaagtgcaggatccgtagcttttgaccgacgagtcctagggtcctttcgatgtacagcgtatcctcgtcccccagatcggacaagcgaaggtcgaccagattcgtgagcgacaaccaggctagggtggcgccgaaaagttcgccttcgtgagcgctgatgtcgaggcgcatcaggtgggtgaggtaaaagtgaccgccgatgaggcattgcgggggcgttcgtgggtcggggtcggtgtacaactcgaacaggccaagcgacgcagccgagagcggccgtcgcaaggtcgagaggccgacggccgtcttgacggcaaagctcggccagatggcaaaggtgggttcgagcgcagggagtcgatgaaagaggctcaggagcgatgcaacgactggtccgcagatggtatccgtgtagtcctttccccggtcggggtgcgcgcgaagccctttgatctactgcgctcgttctggtccacccgcgtcaagagcggcgtggaaggaggcgacgaccctcgcatcgaccttgaggacgataactcggtaaaggaacggcagagtgatagactgaagggagaagataaaaactgagtcagcaccctttgatgcgagctgacccgtcccggaggcttggaggaaaacagcaggcgaagggcacacacgagccacatccggcagacgaagagcagcttgtgcaggcgccgctgattctcgagaagcgtcaacactcattgactgacggccggtctgggatgggcttgagcgccgccaggatgatctcgcgctggacgtcctcgggcagctgggcgagcgaggttcggcacggcctgcaggtgcgttgggcgcagcggtcgagaccgaggtcatctcggctggtcgctctgagacctggcagccttactagtagacagagccgcgacaggacggggcgttggcggacgtgggagtgatcgggtcgatgacaggagagagggcagaggagggagcggttgctgcgcggtcgcctagccttgtccagatttatgaaaaacccggccctgagcaggctttcatctgcgtcgacctcctgacgagtcgtcggcgctccgtctgccgcaacacgtcctccttcatactcacccctccaacagcagaacaacacctggcgtgtcgtactgcaaagcctcactacctcagcatctcgaaccctctcgaacatttgcccacggtgccgtctccaatccaccagttgcgggccatgacgacgacgtcgccgtcggccgcgccgctcgcctctgccccgatcaagcacaccgagcagacgcccgccggcgggttcccgttcggcgccgcttccaacgaggagcccgaggacgacatggtccacgtctacgaggagcacaaggagcggtgcgtcctgtccgatcgggctcaaccggcgtcgatccacgtcgcgtggtgggcccgccgagcgtcatgcgagcaagggctgacgcttctcctgccgcctgcctcgcagcctctcgaccgcaatcgagtcgacgtcgggcctccttaccgacttctcggccttcaacacggcttcgtggtcggtccgctaccctgaggccgccccagcggcgccctcggcgctccagcgtcggcagacgatcgccggcgacgggccagtggccgagcagggcgcgagccggacgttcaatgtcctcaacctcgaccttcatgccggccactcgcgcagtgcaaagtcgctcgtcggcagcctcgagcaggcgagcatctcgcagctgcttaacgagcgcatcgcgaccgagctcgcccacttggcttctctccgcacccgcgtcgaggacacggcctcgtccgtcctcgtcacgggcgacctcaactctggcaagtcgacgttcgtcaatgccctgctccggcgtgaggtcatgccggtcgaccagcagccgacgacgagcaccttctgctcggtcctggacgccaaggacaacgctggtcgcgaggaggtccacatgagcctcgatggcgtcgcctacgaccggacggacgcccggacgttcacgacgcacgcgctcgaggatcttgaggccctcgtcgtcgacgccgacgactcgaagccgccgctcaaggtctacgtcaacgatgtctcgcgcggcgcccaggccgagtcactcatccacaacggccagatcgacatttcgcttattgacgcgcccggccttaaccgcgactcgctccagacgacgtcggtcttcgcccgccaggacgagattgacgttgtcgtcttttgcgtctcggccgccaaccactttacgctctcggccaaagagttcatctggacggcgagcaacgagaaggcctacctgttcatcgtcgtcaaccgctacgaccagatccgcgacaaggagcgctgccggcgggcgatccttgagcaggtcaaggccctcagcccgcggacttgggaggagcgtgatgagctcgtccacttcgttgactcgaaccgcatcatgacggtgcgtcggccgtcagtctgtcgaacgtcagtctcccgttgctgatctgcttctctaccttgactcaggctgccggactcggctcggccctcccggacgacgccaacacggcggccttcaacgcgctcgagacttcgctccggtcgttcgtgctcgacaagcggctcaagtcgaagcttcttccagcccggacttttgtcggcaacctgctttccgacctcgacctgcttgcgacgaccaacgttgccgctgccgccgccgagcggctcgctgccgagcaggagctcgagcgcacccggcccgtcctcgagggtatgcagaagggccgtgagcgcttcgagcggacgcttgaggatatcgaggacgagacggtcttccgtgcgggtgaccggtccaaggagcggctctctggcgcgctcgctgctgtcggccggggcgagcttgcacccgagacgggcttgacggccgggctcgagctgccggcctatccgggcgtgctcgacctctgggactacgcccgggacgtcaagcttgcgtttctccggtcgctcgacgaggctgtccgtctcgccgaggacgacacgcgggcgctcaccgccgtcggcgttaaccaggttggatcgctcggcgaaaagcacctgcccgagggtgttgagcggccgacaaaggtcttccggccgagcgccatgtttgtccgcggtaaggatgtccgccggcggagcggctttgtcggcgccgtcggacttcagagcctcgcgagccgcgacgacctgacggcgctcatgctcgccgacctctacgacgtccacgctcagctcgcgcggctcgcggcgcccttttccggcggcgacgacaaagctggcgacgcctcctcgtcggcactggtgccctacacgctctctgcggtcggtgcctttggcctcgtcggcagtcaggcgatggcaagccggacgatcgttgagacggtccttcgcctggccgatgtcctccgctcgccggcggcccgcaagtgggctggcccggccctcgctctcgccaccatcagcctcggcgcctgggtgatctccgagctcccgcggaccgtcccccgtcgggtcggcgccaacctcgcggccgccctcgcgaccgaggatgagtcgttcgtgagcagccaggccgatcggctgtcgggcgagacgaagcgcgtccttcgggcggcggcatggaacctccgcgcggccttcacgggcgcgatggacgaccggctcgaggacgtccggcgggccgaggcgagccagcgcaaggccgagaaggccgccaagtggtttgacgaggtcggtcggcggacagaggccatccggaccgaggctggctgggtcgagtccaaactgctcgcctaacagtcgaccgtcctcctttcgcctgccccctttgtaccctcgcctgtcgctctttgtcattcacgccctgctttctcattcacgactcttcccacctcctctcgccctctatctggctttccgtaccatagtaccccggcttcgggttcccttcccttcacagccgcgcctcgacgttgtcggtgcctcaggaaaagcgctgcggccgtcagacgacgcctcccactctcgcttgtcttctctacctttgatggctatgaaccactcttgatcaaaggtgacccgactcggggcgtccgcgcggctacggcgtctgttgaggcgagcagcgaggtctcgacccttttgaggcgtctggcgccagagtgcggggtattcatgcaggcgctgccctcggtcgggccggcgtcgccgcccggcgccgcgaccatcttgcttcgccgcagggccagcagcatccactcaaccgaaccccctctctctcctcctcgccttcgtcgatcgcatactctcaggacacagctcagacgtcaatctagctcgactgccaccctcccgcgatggcgtacccggcctttgccgaggactcgacgctgccttaccagctgtcgcagaacctcgcgcggctgtcgtcccagcagcagcagcatgagcagcaccagcaccagcagcaacagccgccgcaggccgactacagtgcctaccaacagcagcagcagcagcatcaacaccagcagcagcagcagcagggccagacgcccggcggctttggcggcgtcgacgaggacgagctcttccggtcgtggtcccagttcaacgtcgcagggccgtctggctcggccggtgttgccagcagcagcgccaacggcgtctcgggcgctggacacgagagtaccgatggaggctcaggtgccggccggacgagcctcaaggtccccttctttcgatggtccgtctgtcgcttctgggttgagcatcagctcgtgggtctcaaagcgccttggatggcagctgactccgctcgcctgccctctctccctgtcgccttaggtttggcccaacggcttacacgcccggcatcaagcgctacaaggtcgagctccgcgaggatgaggacgatgtgccggcaacgacgaccaactcgccaccgctgccgtcgtcgcatctcccgaggctgcctggcacgagcccgagcttcggtccacctcggccgggaacagcgcccggcggcggcttccaccagccgtcaggcagcggaggtccaccagcatactcgccctcgtcggctcacagtcactcgtcgccagagggcgacgcctcgcaccactcgtcctcgcccgaggacctccgccgggccgaggcccgggccgtcaagctcgcgctgttcaagacgggccgcgagcgcatgttcccgcgagaccacgtccttgagcggcacctcgacgtcttctttgacacgctcggcggacactttcccttcctgtcaaaggagagcatactccagcagcattatgccggctcgctgtcgggactgctccagaacgccatctgcgccctcgccgcccgattcgttccgcccgcagcaggctccgggcccgtcggcggaccagcacacccgacgcccggtagctcgcacgcctcgacgtcgtcgtctggtccgggcgaacgtcagccgtaccaggccgcgctcccgttcgaagagcaggccaaaaagctcttagtcgaggtgctgagcttcccaagcgtggagacggccatgagcttggtcatcctcgcctggggcgagtttggctcgggccgagactctggcctgtggatgttcagcgtcagtcctctggtttcgtccccttctgcgtgctggccggcatgctggctctcgacctatccttccgcgacgctgactctcaagctattcttccgcgacgtctgcagggcatgtgcgtctagtctccttcgccctctcgcttcggccggacagcaaccgacctgctgactccttctcctccttcttcagggccatccgcattgtccaggaccttggccttcagcatgaggcgtcgccgtttcacaacccgtcgccgctcgagcgcgctcgcaggcgactcgtcttttggagcgtcttcttcctcgaccgcgtcatctcgtacgggaccggccggtgcgtctctcctctgccgtcgtgagaccaccgctctcctcgctgatcgttgctcatggctttgcaggagcgtgacgatacccgaagaggagatcgacatcgcggagccgtccgaggccgactgcgcactcttccttcctaggcagggcgcggcgacgcggccgccgaacccctttccagcgctgatcgccatcacgcgccatcggggtcgcatctctgacctgctcaacaaggctggcggaccaagcgggacgccaggctcgaccggctctggcggtggctctggcggctgggtccgccagcggagggagcagatggagcgcctccaggaggacatgattggcttctaccagggcatgcacaaggatctccacttttcggtccagtcgttcaaggtctacaaggaggtcggctggagcccgcccttcctcatgctccatatgctgttccattcggttgtaagtccagcgtggctgctcgcagctctcctgacgccctcgctgacctgctgccatcctgctcttctcttccacagatcacggtcgtgcgtcgcccatgcccgtcatctgcaagcttcgcctccgctgacatcctcctcccctgcagcttcatcgaccgagcctcctacagaacttcgaggctggcgagcaggttctcgtcgagccaaacgtcgaggtctcgcgctcctctgcacgaagtcagtcttttcatcgacggtcagagggttgccaatgctgacgttgctccgtctgttttcccgctagctctgagcaacatggtctcgtatgcagacctcgtcggggtccgtcccttcctcttattattctgcttcgctcaaggctgacatagatcgtgccatcactcatctcagccgatcgccctgctggccaacccgttcgccgaccaggcaatcttcatctcggccattgccttccttgacgagcggacgtcgctcaaccactcttcggcgcagcggcgagcgctcaacggtctcggcatgagctctgctgatggcactgggacaggtggcggcgacgggctcaagacgccgacgagccagcgcctgctcaagagctttgccgactcgaagcttgacgtctcaatctcggccctccagaacatcatctcgcactgggccggcgtcggctgggtcctgcggacgatcaaccagaagaagcgcggcttctcgctcgacgagatggaccctgacctcgatgcggatacgccgtgcgtactctggccctgcttgtcgaggcttccgctggccgagctgatctgaccagccttgcgccctcctccccttttcagttcggtgctgattcctaaggatccgacgatggtcaaggcgtggatcgcgcgcgagtggcgcaacggcaagacggacggcgcagcactggagggcgcgagtagcgcagtagcaggagcggccggtctgcctgacctgctagaagggtggtcggctgagggctgggatgagaacatgctggcgctgtgtgagtcgttctttgcctgcaggagccgtcttgcgttcgggactgacatcgcccgccttgcctcgctgcagtcccgtccgacattggcattagcttcaccggccagaatcttgactcatcgcacctcaacctcgtctttgagcccgtctcgcagcactacccagactttgcgctcgccggcggcgacccgacaggcgcggtcggcggccagccctacaccggcatggacctcgactttgcaatggattcgagcgactttccgagcccgagcttcttccgcgacgtcgtctacggcggcggcggcggctttggtgacggtaccgattttgccggcgggggctgaggccgtccgtgtcgacaacagaaatggacggggcggatcggggagacatcgagcacggttcgaggagggagggacaccacttaatgacccctttcacgccgctcgctttgcgctagattgcaatgcagagggcgccggcggccatcacattgaagctcgaatcaccaagagtcgttggactctaaccagtcgtcctgccagctgacgccggagccaaagccatcgttggacgagtcgtcgtccgcgctgacgggcggcgcagggagatccgagcgccagccgcccgcctgcaggataagggtggccctgagcttgagctctggatcgtgctcgaggatgcggccggagcgatcgtggcagacgacgcccgccaagacccagacgacggtggcgatgagactggcgctctgcttgtactccctccggagcgggactccgggctcgttgtcaaagggctcaaggttcccaagcgcaacacgttttggccgaaccgcgcggattgcgtccataagaggagaccgtcggctttcgacgtccgcaaagagggcagccagcacgttgaggggccaaatctctccttgttgtggactgccgagccccaatatgtcgagcgactgcgccgaccagagaacggcttagccggggaaggataggctgctgatgtcttggtcgaaggcgaactgcttgagagccgcgcaggattgcgagaccttgaggtctttgggaaagacgtcgtcggcagcggctgcagagcgcggccctttgcttttgaagagatgcaaagtaacgaattgacgatctaaggtcgtcctggacgaaggctcaactgtatgcttctgaagattgatccgaagattgaccagagcgggaacgaccgagggcagaagcaggtcggagagcgagttgtcgccataagtctggatggccaggcgcgtcaaggcagagaggtcgaagacgtcagcgggttagcggaagtcgaccgtcgcgtcaagagagaggcgctcgaatgcttgaggaggacttgcctgtgcgacgagtgggtagagcgacagcaccttaagacgtggcatgttcggcagcgccgccaggaaggtgagcaaggctgaatggtggacgacgggacagccgtcgtcggtgaccgccggcaggtggtggaggtcgcgtacgagaccgcagagatcggtccgtgtgaagataatctgcaggagctgaacctgaatggcagtgcgatgggggcgaagtgtctgcgagtggtacgacagagactagttgaggacgagggccgcccagaggaggggcgtggtagtgacctgcgcggccgagtgggccgagttagcgatcagcaacgacgctgcaagtcaggagcctggataaagacgacacacattcagggccttgcagacgaggactatattggcgagctggcggttgttccggcgcgcagcaaagaggaggccttcgacgggctcgagcgctgcgcgcaccatctcgtagagcagctagagcggcatctggttcaggcgtctacgatgtcggcgaccgtacggtgagctagtcagtcgacctatggagaatctagaggcggccagagtgtgttgaaaggaggcgatgtacggcatcgtggaggctcgattcgagggcgacaggcggctcgagcggcggttgacagtgatggccttttcttatccgcgacggcggaaatttgggcagaaaggtgatcctgggcctgtcctgtcggagcaggagatcgatggaagaggcttccagggctgaatgaaggctgggagaggcgagtcgacgtcggttggctgagccttcctcaagcgacagggcgacctcgagtcgctcgggtcgctgccgcgcgcccgcacgcgcgcgccacctccgcgcgctacccgacttgactccccctgcgttgagcaagaacgactttcgacaggacctcaagcagaggctgagcaatcaaagcagatcatgggaaccaaaagtaggcaggagggcgagcgccactcgtgcacgaagaggcgaagaggagggactgggaatgggagggctgttcgcacgatggcgagcgcggtcccgtctactgggcaacgttcgggaggggggcgagctcgaggtcgctgtcgtcagacgggaccgagaggatgcggagcgtgttggtgtgaccgaggccacccttccagccctggacggcgacgatcgtctggccgggcttgatgaggccgagctcgaggccctgcttgaggccgaagcggatccggttgtcaacgtcggtctgccactgggtggccgagattccgcggggctcctcgtacaggaagggatagcagccccggtggaggtggatctggcgcgaggtcggggccgagcgagtgacggtaaggatcgggacctccgggcggtacttggaaacaagccgggcggtcgagcccgaggtcgagaggacgaggatggcgccagcgttctgctcagtcgcggcggcgacagcggcaatcgcgagcgtctcggccgtctcggtcggccggggggtgatgttgcgcaggtcggcaaacagcggggcgtagcaaatggacgactcggcaaggtagcacgtctcggccatcatgcggacggcctccatcgggtagtcgcccttggcggtctcgcccgagagcatgacgcagtcggcaccgtcgaggacggcgttggcaacgtccgaaacctcggcacgcgtcggacgcgggttgtaggtcatcgactcgagcatctgggtggcgacaatgacgggcttgccggcaacgttgcacttggcgactggcggagagcaggtaagagagaaaggaagtcagcgtcaagctggaaacaggcagatggcatcgcaacgcactcatcatcttctgggccatgaagacctgcgacgagggaatctcgattccgaggtcaccacgggcgaccatgacaccgtcggtgacggcgagaatctcgtcaaagttgacgacaccctgctcgttctcgatcttgacgatgatcttgatgccggcgccctcgggaccgaggacctcgcggatcgtgaggacgtcctgggccgagcggatgaaggaggcaaagaccatgtcgacgccgttcttgacgccaaactggaggtccttcttgtccttctcggacagggccgggaggtcgaccgccgtcttggggaggttgacacccttgcgcgaacagagcgagccgttgttgacggcctggaccttgagccggtcgccctcgatggcgaggaccttcagcgagaggacgccgtcgtcgacatagatgtacttgccgggcgacgtgaccttggggaggttcttctgcagagggccccaagacaaacgagggtcagcggcggcccttcagaatgggccagcgagagtgaggcaaacgcacgtagtccatgtagatctgctcggccgagcccgactcggcgtcagccgggttggtcgagatgtagaattcgtggccggccggaatcttgacgtcggtgtcgttggtcatgagaccggtgcggatctcgggacccttggtgtcaagggcgatggcgagagggcggcctccagggttggctgaaagaaaaaggggggggggggttctcgtccggtcagcgatggctgcgcgccacgccgacaagaggccggaacgaaggagcgagcactcaccggcgacggcagcgcgggcgttgtcaatgaccgactggtggtactcgtacgagccgtgcgagaagttcatgcggactggcgagggcgagcaggagatgatgtcagcccatctcgttctgcggccggccaaaggatttgcaacgccggcggcggcttgagcggcggagaggaacgagaggacgcaccgacgttcatgccggcctcgcggagggcctggaggcgctcgacagtgttggtcttaggaccgatggtggcaatgatcgaagtctgtcgaagtggggcaacgaggacggacagtcagggtcagccttgccgaagatctagcgaggcggataaggaaaggtcgacgacgacgcaccttacggaggtacttgtcaccctcgagcgcagggctgaagctgcatggcagcaaggaagcgaggaacaagttcagctgctgcactcgagatgattgcgaggagactggacgaacgtggcgttgaggctcgagagccactcaagggccgaggtcgtcgtctgaagagcaaggcgcaaagcgagcaacaggcgtcagccggcatgctcgacatgcttgcagagcttaagaaagccacgaaatcctgctgaccttcttgtaggcggccatctttttctaaaagggaaaggaggttgagaggggaggggttggatgaaggagggtgggggagaaagacgtcgaagccgcagatgcgaaaagcgagctggacgacgctgccgccggcaacggccctcgccgcgcgcacgggcggagagcgaatcagccagcaaggggtccccatccccagccaagcaggcagattgcgattcgccgagacgacgacgacgacgacgacgacgtgcagggaccagggctgacacgacgtccgggctaactatctatggactatcactgatctcttctgcgccgtgcagctgcggtcagcgcagcggctgccgtcactgcctccctgaccgacgaaggtctggccgcctaccttacccttgcctcaggcgcgcatcaggcaacggcggcgctcgcgtatgtcagttcgaagcgtcgtgcgggccatcgccgcgcccggatgggggtgacaggtcgcgcgcatgcatgcgtctcgcaacggcttcgctcaaggaagttcggttgcccgtcgagcaatcaacctcgctcttaccacgtcggcggcgggcgaggctgtgcgctgctcccaagcaagaccatgacgaagcagggctctcatgccagctgcgcctgcgagaggaggaggcggcgcctcgagcagaagcgcgcagacgccgaccaggccgacaagacgtcagcgctctccctgccgaaaaagtggcgcggcatcgtccggcggcaactgaacaagcgagagtggcggtagtggcctgtcccggaggtctgctgtctgctgccgagcccgctggctcgaggcgttgatgccaagcgggcgctccatttgtgctcccttgttgtgcacccttgtcgaacggaaggactgtcccggcccgtcttccacgccgaggtccatggccgaggctgattcagacgagcggtcgtcgaaggccctcctcccttcctgcgggctgttcggcggccgacgaatcagcaagggaagagcagtcttgcctccgccagaccaaacagctgaaagttagcagctgcagcagagggccgaggctgcgtgagtcgaggcagacgcgtccgcacgcgacccttccgagttaatggcagcctcggcgggcgagcagaggcaagcaatgaaaaggtcacgggcgaagaaggcaaaggccgggtcctctctgccctgcctctctcgcaaccagccccctttgatgcggacggcctccactcttcgtccgttctggccttccctgcgccaccggcatctctcgtcctgtctcttgctgccgagaggcgcgcggggccgcgccgagcccctcccctccctcttcgcccggcccgggctggctctcctctcgctttaggctgtagacgtttgtgtgattgatgagcaggcaaagcgtcgttcgtggatcgggaggaggagaagcaaggtcgagcccgcgggcccaaacctgtggccgcgcccgcgagcccgccgacgagcatctcgcgcctctttgaccacgacccttttccccttcctccctctcctctcccacccctcatcgccatgtctccggccgtggcatcgtccgcggcgtcctcccagcgcaacacccgcggcggcaggggctcggcagcctgggcggccggcggcggtggcagcagcagcagcggcagcgcgccaaagggcaagccgacgacagcagcggcgagccgcttctgggttcagacactcaaccgcgaacgcgccaacgagcttcagctgaggttcggtcgtcctctcttcaccgtcccaggaggccagcgtcgctgaccctgacctcccctcgctacctccttctcaccaggcaacggtcctatggactctccatcctccagcagcccgagaaggcccggctgagctccttcaaggactcgtccgacacctgtgagcgctctcgcgggcccgacttccggctctcggctgaccacccggcctcgacctcattgcctctccgtcttgcgcagccgagtaaggaagcctttcccttgacccggctgggccagccttgcccgcctgccagccgtccagggagctgaccgcgccctctccctcctcttgtgatggtcgttctcggccgcgtttttcgcgtaccggcgcgtcggaatctccttgtctgctccttcctttaaccctcctcctccctccgtcgacggctgtgtcttccggcatgcgcctcggtcccgaccgacgctagccgtcggccggtcgacccgcccatcatcctccaggtgcactcgaccaatcccgcgcgtgactgccccgacgagttccttgagagcgtctcgttctttacgcgggcccacctcgtcgccgttagcccggtcgagggtgggcttgtcaagaaggccgacgtcccggccgaggtcatgcatgccggcggcgagtggtggaagcgcgtcaagggaccaaagggcggtgagccactcgccggcgaggagctcgtcggcggcgagaagatggccgacccggacggcaggagtgcgttcacgtatcttgcttgcttttcatcccagcttgcgactcccgtcgaagctcgctcgcttcatagctgccgagctgacactgcctcgtgcgcgcgcgcagtgggcgtcttctttatcttcagcaagctcagcatccgcgtgccgggcaagtaccgcctgctgttcagcgtgcgtgtcgcctccagaattcaagctttagcttgagctgacttgacttacgactctcgtccgtctaaagctctatgagatcactgggtgcgtcctgtccaaatggcctcgggcctgctgcgcgtaggctcaagatgctgacgtcgcttcctctgcttccaggcccgtcgtccggaaaaaggcagcgatcgtctccgagattttcgaggttttctcgccaaaggttagccgactgcgactcagtcagccggcttgcgttgatcgcttgaagctgactcgcgtccactctccgcttcttccgccagctcttcaccggcatgacggcgtcgacgccgctcacgaagcactttgcgcgtcagggcgtcaaggtcaagatccgagggaccggcccgcagagcgcttcggcccagcgtgggcttaacgtttctgcgtctggatcgagacagagcctcgcaccgccgaatgcgtccacctcgacaggcacgggcacgagcagtgggtccagcgacccttggagctcgactggctcattgggtgccgccagtcggacgcgcaaggccgaggatgacctccgtgactcgaccgaccatcaccgctggctgcgcgtcgatgagagcggcgtctcggacggcggctggcgtgctacgggtaacccgggcggagtgggaggtcccctgaatcccccttcaagcatcggtgacaacaccgactacccgcacccggcaccctactaccccgattcgcagcggaccttcgacacgcagccgccgggccgttcgctcccgcacctcaatcaactcagcccttacctccagcgttcggcgccagagccgtcaactgctccgcccggctcgtcggcatggtctgagccgatggctgcccccccaggccgcgtcacggcaccaccgccgtcgaatcgccagcaggcccacagtcgcgctgcgacgtatccctacgactcgccggcagccatccagccgcctctcggcgcgcactcgctctcgtacccgagcccgcgccacaactggggtccgtcgtacgctccgccgccgcttaggggcgcccagtcctacgggcctccgtcgacggcgagcgaaccgcagctcgacctcgccgtcgccgctgcgagcgggacgacgacaggcatgccctggcagcaggagacgaccggatacctctcgccagagccaggacgcagccatctgagcgatgggctcgacccagacgagcctaaccactggtcgcagggtagcagctaccctctgcagccgccgggctcgccgtcgcccatggcgtttgcctctgttcagccgcctttctccttctcgtcggcggcgggcgcataccgcgactcgcacctctctcagccgtacgccgagagcgcagcgtcggtcctgacttcgccatcgactgcgcactcgacgccgcccgtcgccgtcccgggctacctgcccgagccgaacgcgcactctcgctcagccaccgccgacgactaccgcttttacgagctctctgtcggtcgtcagcagcagcatcatccccagcagcatctccagcatcaccatcaccagcttcagcaccagcatcatgtcacccagcaccagcaccagcagcatcagcggggtcctctggccccgggcggtggcgagcgctcggcgatcgactcgttcggctactcgtaccggccggccgtctaccgtgactcgggcgacccttgggatcgcgtccaccagccgagcttttcgcacgacccggcctacctgggcgcctaccagcccaaccttacaagcggcattccgccgttcccgcgccatcggtcgccgatcggcggcggacatgacccaggcagcgttctcttgccgaccttcggctacccagggtcagcctcgctcggctcgagccagcagacgccgtcgtcgctgcagcatcagcagcagcagtcaccccggcggcaagagcagcagcaacagcggcagcatcaactccagccgaacgaattctcgtacgcgatctccccgcccaccatacccaacacgctcgatccggccgtcgacggcagccggccagcctcgtccccttcgcacggctgaagacctgagcgcgtcacacgcacttggacgtcgcagacggcgctcctcttttaccccccatccttgcaaacccttccctctcttgcgactgatatgccgtttgcggccagcaccatcagggcgatcttctcaccgtgcggcacactctgtcttctacggcccaaagattgccatgtcgcttcctgtctagccttccggctgtcgttacagaggcgacagcgagtcgaagcatgcctcattacgaattcatcagaagctcctgcagccaagcgagatccgcttcctgccgtcacacgatctgcacaacgcgcgcgcgcatgcggcgccgccttgcgcgcacctccggccgcaggcctgcgctctcggtctagagcccgttgtcatctggtctcgacgagatttaagcgaaccatcccttcttggccggctggacttcgaccttggcctcgaccttgggcaggtagtcgcgggcctcggcaagttcgcgcttggcctcgtccgagatctcgcggccgcggcggagcgcgtcctcggcaccggcagcggcgtgcgccttagcggcctcgagctcggactgggtcttcgcggcagcgcgctgggcgtcggccttgagaacgtcggccgaagccgcggcgtccttctcgagcttggacgcctcggccgaagcggtcgacgcggcggaaccccagagcgaccaacccttcttctcgaccttgacggcctcggcctcggcaacgttggcagccttgcgggcctcgtcctcggccgacgaaagggcaccggcgacaaagtccttggcggcagaaagctcgcgcttggctgcaagggcagaggccgaatgagaggaggtaggagtcaggactggtttgaccttgagcgggacgctctggcagagctggcaacgcaccctcctcggcaatctcacgaccacggcgaagagcgtcctcgccgccagcggcagcgtgggccttggcagcctcgaactcggccttcgctgtagcagcagcctgctcggcgtcagtcttgaggatcgaggccgacgactgggcgtccttctcgagcttgtcggccgtctccgaggccgacgacttggccgagccccaaagcgaccagcccttcttctcggccttgtgcgcctcggcctcgacgacgttggcagccgtgtgcgcctccgactcggcggtcgaggccttgcccgcaataaattccttcgcgacggcaagctcgcgcttggctagagaagcgcagtaccagacggtccgtcagcaaaccacgccgagcgggcgtgactagcagaggtggatattacgcaccctcctcggcgatctcgcggccgcgccggagggcatcctcaccgccagcagcggcgtgggccttcgcagcctcgagagtcttctggctcttgttctcggcatccttgacggcagagaggacggccgactcggcgtggtcggcaatctgctcagggcgcgactcgttgcctgaaagagagaacaagaacttgatcagtgaacggaaggcaagcattggacaggactcgagacgcaccacccatgtaccagtaattctgaggcagcggtggaaggtgtgaacgtcagccgggtaggagacgagcgacgtagcgcacttgagatcagtagctggcacgcacgacaaaacggccggtctgaacgatctgagccgtcgcgttggtcgcatggcacgcgaagaggaggctggtgggtcgacgagatgggtcagccgtcgtctaagtacaggtgaacagccggcagtaagcagccacagttcggacgcactagttccggggctggaccatccaggcgaatcgcatgaagatgagcctgtggcacagcggaacgttgggagacgcgtcagctccgtcgcctcgtcaagcctcagtcgcctgccgacgcacgagtagcccgccatggtcgggctcatgacgcccgagattagcgactcgtccttctgcatgtctgctagcgcggcgaggggcagaccccagttggcgacctataggaagcaagagtcaaggtcagctggtgacccggttcgaggctcgcctgcaggctcatcgcgacaagacgcaccggaccccctgaggcgggtaaggcgcgaccgttggcaggactcggtcagcgagtggtacgagacaaggaacaagagtaggagacgcacagaagtgggtcgagaagaagtaggctcgtccctgaggggacttgatcctgcgagtgccgagggtcagagcgaccggccgtcagcagcgtgccttgccaggctcatgctctcgcaaggtcgactcgaagcggacgcaccagttgacgaactgagacgccatcgtgctgacgctttgcgttcgaaaagcaggactggcgagagagagaggagatggacggcggttcggaggggggaggggaagccggcagggcgggcgagcaggctcgtggcctcggcggcggcgacgaaaagcgcagatgcgagcgcgccagaacctcgcccggcagcctcgtcataacccgccgcggacgcccacttgcgacacggagagtcgctgaagcagatgaagaccagtatgggatgagcgccggccgacctctcccaccagcagacgtcgtctcgtttcaggcattgcatctacagcaaacgcgcaatcactcgatcgcgaacaacggcttgagcttcttgctgttgagacgagggcgagtcagtgagggtagagtaagacgaccggagggagagggcgacgcacatgagggcccaatcgctcggctcggcctcggcccggaagtgctccttgagcgtgtcgatgctgttccgggtgatgaccgagtagagttcgtccgtctcctggaaatgccggccgacctgcatgtgactctggttgatgatgctctcaatcttgatggccgcgccagcaccgatgttcttgcgcgtcagcttgtcgtagctctcatggttcttctcgctataaagggaaaaggtgaggagggaggggggggggcggtcagtcgggtcgcaaagtacgcgctgagttgggaggtacacgaacatcgaggtactgtagtttcagcaaaggcagagtgaggaaaggcgtcagccaacagtcgctaagttgaagggatagcctgagggacgacgcacatgacgccgatgttgacgatcgtcttgctcgtctcgccggtcgccttgtcagtgtcaatgtggacggcggcgaggggcgtgccgatgcggagcgtgccgtcgaggatgtcgacgccgaggacgatagggtcgcgccgggcaaagacctggagcgtcttgagccggcacggccagatggccttgggcgcggccgctgcccgtttggcgtcctgcacctccttgttgtactttgtaaaggcgtcaaacaggtgataaatgatctcggccttaaagatggtgacgccgagctcgccggcgagcttctcggcctccttctcgaccgggacgtcgaaacagagcatgcaggcgtattccttgaccttttcgaccatcgtcgaggcctgaatgacgtcgcgcttgtggacggggccaatgttgatcgtcgagacaggaatcttgctgacgcgaaggaactcgagcagggcctcgagagagccgagcgtcgaggcctggaccgagacaccacggccagacttgtcgacccacgacatgaggttctgcaggtcggccatgacctcctcgccgaggtcctcctcgtcgtcgtccggaccaacgacgagcagccgcgagccagcaatcgccttctcgagatcgggcgcggtgatcttgataccgagcgcggccttgacctctttgtggtggacgtaggccgactgcgatgtgcgaggcaaggggatcagcacggaaggcagaacaagtacgcgcagggtgacggaccttgacgcgcatctcgcgcagcggctgcggcgtcaggagcgcgcggacattcgtgtagattgggccgttgagaccgcagacgacgatccggtcgccctcgcggaggtaaccgtttgagaggacgacatcgatcgtcgtgccgagaccctcgatgaccttgacctcgaggacggtgcactcgagctcggaaatgtacatgaggctctcggccatccgcgactgcgtcaggttgacgagcagcatgatcatgtcggggatgccctcgccggtgatggccgaggtcgggatgagcgaaacgttgcggccgaggttcttgttgtcgtagtagaggcaggcgttgagaccctgctcggcaaaggcgagtatcgtctccttcgtccgcgattcaaactcgcgctggacctgcttggtctgcttggcgagcgactcctggaaggcaccgtccggcgtcgccttccagccgtagatgcggtcaatcttgttgagcgcgacgacaaacggcgtcttcttgtcgcgcaggagcttgagcgactcgagcgtctggggctcgaggccgtgctgcgaaaagggagaggacagcacgcgatcagcgacgtcaggcacggccagccgagctcagggcgggacggaccatgatgtcgacgacgaggatggcaatgttgcagagcgacgagccacgcgttcggaggttagtgaacgactcgtggccgggcgtgtcgatgacgagcaggcccggaatcttgtagtcaaacttgccgtcgcggttgaggacctcagtcttctgcttgatagccgagaccgggaagtaggttgcgccaatctgctgcgtgatgccaccagcctcgccctcctgcacattggtctgtcggatcttgtcgagcagcttggtcttgcccgtgtcgacgtggccgagaatgcagcagatcggcgagcgcaggtcatcagcgtcgcggttggcgatggcctcctggtgacgggcctgccgccgagccttgctttcggccttggccttatcggcaacccgcttggcctcggccgccgtcgcagcagcacgcttctgggccggcgtcagctcgtcctcggacgacgagtcgtcagagtccgagtcgtccgaatcagaatcgtcagagtcatccgagtcgtcatcgtccgagtcgtccgagtcggactcgtcctccgacgactcctcgatgggcgcggcaaccgccttcttcgcaggcggggcagccttcttctcggcagcagccggcgcagccttcggtgcaggcttctcctccttctcagactcagacgacttgtcccagtcgtcttcgtcctcggcagcagcggccggtgccggctcaggggcgtcctcctcgctcttgtcccagtcgtcgtcgtcgctctcagccttggcctcttcctccttgaggtcagccttggctagcttcttcgtcacctcggcgacctcggtcttcgctggtgccggctcgtccgccaccttcttggccgccgggcccttcttcttgttgccatagacaaccttcttgggcttggcggccgcaccgcccgactggaggccctcgatctgtacgcccgacgcaagcagggccgcaagacgcgcctcggccgccgccttctcggccttctgcttcggcgtcaggagccggccctccttcttggcaagctccttcttagcctgcaggagcgtgggaagggcaaaggccgggtcagctctccgcggcaggctgaagtcgacgcaacagagcacgcaccttctccttctccttcttgcgcgccttctcctcggcgatccgggtctcctcctcctcgagctcgcgctcctcgcgctcgatccggagccgctcctcctcggcctcgcgcgcagcctgctcctcagccgccttgcgagcctccatcgccgcccggagcgcagccatgcggcccgtcagcggcttggccggcgcagccggagcctcctcggccggcgccgacgccttcttcttcttcttcttgttcttcgacttggctccgccggcgccggcgtcctcggcctcgtcgtcgtcgtcgcctccagcagcaggggcaggcgcaggagcggcggcctcggcagcgggctcagccgccgcgccgcccgacgccttcttcttctcagcctgagctttcttcttggcctgaggtgagcggcggagacggaggcgcagtcgtcagcactcgggcgcgcacgaggtgggccttccgggcggtcgagacgtaccttctccttttccttcttgagcttctccttttgcttcttgctcaaaatcttgactccgccctcctcaccctcatcatccgaatcgtcggccgcggcagcgggcgcaggcgacttggcggccggcgccggcgctgcagcagcgagcggcgactcgtcgtcctcgtcatcagcggcagaagcgacgggcggcgtcggagggagcgagacaggggccgacttgttcttcttagacttcttggacttgctgatggcgccctggtgtgcgatagacataggtggccgaaagtcagggcggaggtagacaaaagggcgagtgggccaagcgacgacgcaccatgaggcctccaccggcaaattcgtcgtcgtcgtcggctgttacggcgacaggaccggccagctcagctgccgcctcttcctcgggcgcagcctcggcaacgggcgggatcgtctcgccgacagtgtccctggaagcaggtccatgagcggagggtcagcacttgatgaggcgagctccgtgcctccgccggctgagtgcctttcagagaagctggacgcaccagtagtcgtcgtcgtcggccttcttcgacttctttccttttcccttgggcgccattgtgtttgtggatgaactgcgtgggtggttgtcgaggcgctgctgtcggccaagatggtcgtcgcccctgcccctcccccccacctgcgccccgacacttgggccgctcgaaaatctcgacagccggacgagagccagcccctttgcttcgtcgagctcctcatcaccgaccccacacaccagacgacacaatggcagccctcctgtcgcacctgcagacgagcctgctctcgccgcccgagccagcggccctcccgacgctcctcccgctgctcgccctccaccagccctttgcgtcggcccaagccggcggacccgagcaagccaagtttctgcgcgcgctggacgcgctcgtcgtcggcaaggacgaggccagccggctcgttggctggaccgtcgcccgcgaggtgcttgaacaggaggctcggggcggccagcgggcgcgtgacggaggctgcatcgagcgctacggccggagctgggttacgaccctcgtcggtctcgccggcgtacgtcctcgtcctcgcgcagctctctgtccctcttgctgaccacctcaaccccttcggccctgtagcagaagaaactgcccgagatcctgcttcacgcctatgccggcctcctgtcgaccgttttcctgacggcatcgctgagcccgcagttccagcgcgagtcggtcctgcctgccctccagaagctcgtgctcgcgctcctctccttcttcccgcctgcggccgcgctctcgcccgcccacctcgacgcgatactcccgatcatcggcccgctcgtcagcctccacccggcctctctccggccgctccagagccagctccagacgctcgcgctccgggcactcacacagccaggcgcgtcggcggcgacgaaacgcgcagcggtcgacctctttgcggtcctgccggctctgctcggcaaatcggccatgccgcaggcgttccacgtcgccgtgctcgctgcgctcgagagcgcccaccagggcgccgacgcgctctttgagggcgtcatcgaagaggccgtccgcgagcgggacggcgagggcctcaagtttgcaccttgggacgaggcccggcgcgagaaggacggctggcgtcggcgtgcctccgggaagggccgggtcgaagccggcgtccggctcgttgctggtctcctgcgccaggcgaccgagcgggcggttccagttccgatcggctcggtcctggcgcttgcattgcgtgtattccgtgtgacttcggccactcctgtgcgtcgttcgcgtcaagtacctgcttctaacaccgcgagagctgacaatcattcaatgaccgccttagattgcgcccaacgccagcacggaggacgtccacttgacgctcgccatcctgcccgagcttcatgcgctggcctgcgctcttgtcggccagcttggtctcgcgtcagttctcctctgcgcgtccccgtctgctttgctcccctgttgaccaggcccctcgctcctatattcagtgtcggcccgagcatgatgcctcacatgaccgagctctcgtcgcaccttgtctacctgctcgagcagacggcctcgtcgtatgttagcgcatcatcgttcaatgtgagactcacagctgataatcggcttcggtctctttgtcgcctcaggctcgtccaaactaccctgcagcagacgctcgcccttctcttcgagaacgtcggcctctgggcgccctcgcgcgaggtctctgcctcgctggtcgaacgtactgtcaaggcctcgctacggatcgtcggcggcgctctcctgccctcgcgcaagtcggtcgacgacgaagagtcgcccactgcagccggtctcgagattcacgagggcgccggcaaaggcaagggcaagaagcgtgcccaggacggctcgctcggcggcaacctgctcgcgacaagcgcgctgcctctcgctgcgcccgtcgtcggcgttgtccaggcggcgcttgcgctcctcggcctcttgctacctcacccggctctgcccgtcccggcacacgtgcttgcgactaaggtcctcctgagcgtcgccttttcgctcccgcactcggccgttgtcagcggtgcgacgcagcagacgctcgaggcgacgctcgcgcggctgctcgccgagggcgtcgagagtggcccggtcgctcgcgagggcggggtcggacccgagcttggctgggtcgtcagctcgatcggctcgtcgtcaaagacgtcgaacgaggttgccaagttcctcaacccaatcctgccgccgacgcaccagccgctgccgtcgctcgacgcgacgctcctctacctcccgcccggcccgaccgaggctggcatgcgggtcgaggtcggcttcgctaccgcgtccgacaccgttcgcctcgtctcgaccgagaccgaggacgttctcatgcacgttgcgggcggatctgtggcttcagcgccggttgccgccgtctctgcacccagctttccagcagccgtcgcacctgtgcccaagatcatcgacagcgcggccgcgccggacccgttcgcgctcccggccctggccgctacagtcgccgagctgattcccgctgctgctgctgcagcccctgcgcttgccccgctcgttgcgcctcccgccgccgccgccgccgtcgcatcggcccctgcacccgccgccgctccggccctccagccgctgccgacggccgtcgaaggaggcatcgagctcgccccgcccgtaccttcggtccctgtgactggcggctggcaggcgatggagcatgacgacgctgaggccgaggagagcgacggcgagatgcccgagatcgacatgggcgacgactcggacgacgaggaggacgagtagagcgcctggatgcatgtcgttcgctgtgaaaaggggagaagtcggttgcgacctgtccctccaattcggtgggcgcaggccggcatctagactgcgggtggtctgcgaagacacagtcggttctgttagtcttcccgtcgtaccgtcggttcacgggcgacgtccttcatgcgctggccaacatctcggataagagggcctgcggatggaacgagcgctgaggcaccgaatagatcagcctgaccggtcgaagtcaactctccgcccaacgtaaagcggccggtccagcagcgtcagcgacgatgtcagcccgcaactaccctgcttcgacccaagccagcgccgtgcgagggaatccggccgcccccgtcgcttccgtccggcaaagacaagtcagatcgtcatcaatcgcgccagccttagttcttacggcggaacgagcagccctccgtaagacgggccttgccgccgcggggctggcagaggatcgtctggcacgagccgcactgaacggctgtgggttgcggagagagttcggaagggaaggggtcagttgggtagcgaaaggggaggggagtgagagaggaaggaagggacggaccggtcgaggcgtgcgagaagaccgtggtgatctggaagcagccagggcacttgacgtcctgttggtcgggcgggcaggcaaagaatcagtcacacgctcggcatgaatgcgagccgggacgaaagtccctcaaacgacccgccaatgcacgacgagcattcgcctaaacgccattgctcgtcccatgagcacaggccgcagtcgctacgccgcacaaggccgccagtcgccagaatcatccgggcataacgacgactggcgtgcttcccgccggcaacgcagcgcccagcgacccagccccaactgcccgcgtccattcgtcggtccgctccacgcgtccgtctttgctcctcggcaacaagggaggtcagaggactgaccatgaagaacgagttagggctctgtaccagccgcttgagcttgtgcttggactgctcagtctcgtgggacgggttaaggagatcgacggcgagagtcctgcagacaagcgaggaacggtggtcagctcggtcggtcccatgagttgaaggtcggcggcagaagcaggggcaggacgacaacccctcccgacaggacgacgaccccacgcccagcggctggccggccggctggtggcggagcgcgagctccacctggcaagcgttggctgaaaggcacgagctccagcccagcctgcctgcctgctcgctcgaccagcgtcccagctggcgtggtagaggcgtgctgcaaagggcagaacccttccctctagcggtacgctccgtcgtgctccggccgggactgagagtgaccgacgcctggtcggccgatcggaggcgaggaagagggaggcagcacgagcggcccctcgatgcgttcccttgtcctccacagagccatccagcgtctacagccgtaggtcgtccgtccgtccgtgtgtctgccgtgcaagaggagggccttacatctttgtccgagtgagaaggctaggggcggtctgagggagcaggcaagggcaggagcagcgaccaacgcgggtcggagggaaggggcgagggctaggaagcggcgggagtagtgtcaggtcagtgagcagtaggaccgcttaagtacgtagcggagggcgcacctggggtaatgctgagggagctggtatgttacgaggttggcggtaggttgagcgcaaggaggcgacggccgccgccggagtcaggggctcgctcgatgcagactatcaagctgagatgcaggagtgcaggtcctttgcctccatcactcagcggcccgccggctcctccctggccagccagcccactctccaccacctcgtcctacactgaaccaagccatggccgagtcaacatctaccgaagcgtcgacgtcgactgcctcggcgccctctgtcccgttcttcaagaagaagattaggccgcgtccgaccgcccgccagcgatcggcctcgccgccggcagctgacgacccgaccgcagcagcccgctcggcctcgtcgtcggcagcagcagcgacgagctcgacctcgaccgtccagaagccgtcgcgcaaggcggcgttcaacccgctcgtccagggtacaaagcgcaagtcgcggcgcgaggacgaagacgacgccgacgacgacgaggcgtacggcctcggcgacgactcggccgtcggcgtcacctggaaggcgagcggctcggccaaggcggtcaacgccaactttgtcacgggcggcctcgactgggatgccgatgccgaggaggaggaggagaagcgcaagcggcaacggctggtcgacgtgcgtcttcgctcctgttcgcgagataggcctggtcgctgtgctgcccttacatcgaccgaagctgacgccgcacctcttgccatcctatatctccaggctgcactcaacgacggcgtcccggacgacggcatgtaccacggtgcggcggcctacaagtcgcacattgagcaccgcgagagcggcgtctcgaacaaaatgaaggccggcccgcaaaaggcgagcagcaacatccggcagattaccgtcatcgactaccagcccgacgtctgcaaggactataagggtgcgtcgaccactgcgttatttgctgcactactgccgcgagtcgaggctgaccctattcctctaccgcagagaccggctggtgcggctttggcgacacgtgcaagtttctccacgaccggggcgactacctctctggctggcagcttgacaagcagcacgaaaagacgctccgcgagggccggctccagggcgacgagccgggctcgtctgacgaggacgacgagatcccatttgcgtgcctcatctgccgcaacgcctttgtcgatccggtcgtcacgaaatgcggccactacttcgacagcgcctgtgcgatcaagcggtttgcaaagaccccgaaatgctttgcgtgcggcgcgccgaccggcggcatgttcaacagtgcgacggccgtcctcaagaagctcgaggcaaagcagaaggcaaaggacgagcggaggcgcgaggagcgcggcacgcccgagctcgaggacggcaacggcggctatcacatcgaaggggaggacgaggacgacggctgagggcgtcgcgcgatctcatggcctcggtcagaacaaatgcgtcgcctcgcgcaagctgcctgtgcaagtcaagcaatcagggcgagctggcattgggtgacaggcagggtgggcttcgtaagggtcatgataagagtcgggtcccaggactgcctacgacggggacgaggacggggggagcaagcggtcgaaagaagtgcaaggtcaattcgatggagggcgatcctcgtgaggcaggaggctcacctggaacgggcgagagagcgaacaagagcctcgaggcctctatttcttgcccttacccttgccggtcttctgggcgacctcaacaacctgcgtaaggagaaggaagagcgtcagtcgaggagcaaactgaaagacggcagcctggcagacaacgacgccgcactttctgcatcttctccttggtctcggtcgcgccctccgacatccagtcctcgagctcgccgacaaaggcgcttccggccccctcgccctcgccggcgtcaaagccggcatacttctgcttgaagcggccgatccggccaaactcgtcctggaggtcgcgcgaggcgatcttgttcgggtaccagagcgggtggttcgataggtccttggtgagcttgtagacggaccgcggcgaggtcgtccagtgcgtaaaggacgagccgtcggcgaggacgacctgctgcgggtagagcggcgggcttgccggaggaaggccgagcggtcgaggccggtgcgtgcggcccctgagagcggacgagagcgactcgcggagcgggaagttgtcgtgcaaccggcggaggaagccgaccttctgataggcctggagcgaggtcgaggcgcgcatcgtgactggaggggttggccggatcgagagagtgctggtcggtcggtcgcgagctggactacgaggggagggcgagcgggcggggcggcggcggcggcgagaagcgcaagtgcagccgccccaaggcgaccgtccattgtcggccgcgcttgcctggccccgggctttttgcagccagccagccagcatccattgctctctcccgattctccccctctcacagacaatctccctcgcatccatcatgggtccgtccgcgtctggccgtcgagcctacgcacgttcgagcgagaccgagagcctgacgtccccgccctcgctgctgctgctgccgccagctcccccccgcaagaaggctaccaaggttgcgctgaccgacttcctcggcggcggctcgtgggccgacgaggtcgaggagctccccaccgcgcccatcgcccggcccgagggcttctcgtcctcgggcggcggcgacttcatgtcgcgcccggaccggggcgaccgctcagactacctcggcccgccccgcgaggagctgccgatgccgaccgcgccgccgtacacggcctttctcggcaacctcgcctttgacgtcggagagtccgaggtcgagggcttctttgacggcatgaaggtgcgtcgttcgtgcggaggtcctcgtggcatactcaggctcgaggggatccctgaccaagcccctttacccttgatcgcatgcagctaaacagcatcaagctcatcagtgacatggacggcaagccgaagggctttggctacgtcgagtttgcctcgctcgacgacctcaaggagggtctcagccggagcggcggccagctcgccgcccggaccgtccgcgtctcggtcgccgagcccccgaagggcggcttcaagggcggcatgttcggcggcgtcgccgacgagaagtcgtcctggcggcgcgagggacccctcccgcccctcgctggcggcggaggcgcgccggagcgccggagctacggcaactcgtccccgcgcgacgacgagcccgagcgtgactggtcggccgcccgcggctcgcgcttcacgccctctggcccggccgacggcccccgctttggcatgggcggcgccggtggtggacccggtggaccggcaggcatgggggtcggccccccaaggtcggggggcttcatcagtgagagcggcgccgcggctgaggcggccagccagtggcggaccggcaaacccctctcgggcccgcacccgcccggcgcgggcttcgtcccccgtggtggaccgatggaccgggacgcactccctcaccagcgtggtccccggcccgacgggcccccgggcccggccgacaccgagaaggaggtcagtctgtttcgccgaagctcccctttagtcctactcacggcgctgacttgcgcctccctgcttgactcctcgcttttagtgggttcgtggtgccaagttcgtccccgcgcctgaggctcggccgcagcgtaccttccaggccggcccgggaggtggcccgcccccgcaggcgaccgacgagcccgccgactggcggtcgggtccccgtcgtggtccgcctagccggcaggagagcggcgagagtgcgtccttccgaccagcgtctgaatcaatctgccccccggctgacgtttttcgctgcctgtcgtcgtagactctgtggcttcgtcccctcagccccaggctcggcgcccgatgacgctcctccctcgctcgggtgcgccctcgacgcccggctccgccgagtcgtcctcgcccgctgaggccaagcctgctgcctctggcgagtccaaggcatcaccgtttggcgctgcccggccggtcgacattgccgccaaggagaaggaggttgaggagaagattgcccggcaggcggccgaggccaaggagaagcgcgaagctaagcaggctgagatcaaggagaagcgcgagaaggaggcggccgagaaggctgccggcggcggtgcggctgagggcgacaagaaggctggcgctcggggctccaagtcgccctcgggcgctgagcctgccaactggcggtcggccaagacagccacgtcgcccgcggcggtcgtcgcccctgctctcgaggccattccggccgtcggcggcggcggcaagaaggtggccgtcccgacggcggccgagaagaagaaggaggctgagaagaagaaggacttctcgttcaactcgctcgccgtcgagggcggcgaggacgacgtcgacgaggtcaccgagggcgtcgaaaaggtccaggtctaagaccaggctcactcttcgcccccgctttcgccacgtctcctctgtttccaactacccccctaaaaggaatccctcctttgcttcgagcacccggccttccacccctttaccgtccctcccccgccccgtatggccttgcttgctcgcgggcggcgccctccccactcttgctggtctcccccgctgctccctgtactcgatattccatcgctcaccttttcaaatctacaatcaacgcgtcgaccgccgtcctgcacgacttgatttgctgacgctgtgggcccttctcttcaggcgagttgcgcgcgtcgtatcaaggtcgcggctgactgccccttttacgtcccggacgacatctcgctgcttcatcggccgacgcagcctttcttcttcacctcgctcgctgacagctcgcagcgtccgcatagctctccatcggtcggtcgcaggacggcgctggccgccacggttactcgctcgccaatcagggcgggccgaaaagaggacttcgccgtcccggtcattagcctggctcgactgccctgcggatcgcctttcgaccacgcctcgctcgacgtcgactgcacccagccttgacctctctggtggccggggacgtgaccttgactgcttggtccccgccgagtacatgccctcgtcgccattcgcgggctcgactgggctggcgcgaaagccaagagcctctgcggtcgtcccccttcgtctctcctctaacgacattcttctctaccatccactctcctgactttctcctctgctcattcgccatggtcgccgctgcctcttcctcatcctcatcacgaccgcgcctgcccgtcacgctgctctcgggcttcctcggcgcgggcaagacgacgctcctggagtacatcctcaaggtgcgctgctgccctcgtcttccttgcctttgagctcatggagatgtctgaagcgccctttcccttccttgctccagagcaaagaccacggtctgagatgcgccgtattagtcaacgacatgggcgccctcgtaagtcgagacgagagacggccggtcgtgttggccggaagctgatcacaaggctcgctcgcatccagaacatcgacgccgccttgatttccaaccggaacatcatacagaagaatgagactgttgtccagatgcaaaatggtccgtcagatgtgcacctcgtcgggaagggcgatgctgactagtctaccctctgcccccgtccaggctgcatctgctgcaccctccgggccgacctgcttgaggaggtcgcgaatttggccgaggctggcgagtttgactacctcctgatcgaatccagcggcatctcggagccgattcaggtcgctgaaaccttcacgatgtgcgtcgtcatttgcttgcacgcgcctcccgttcactgacgcgatccatgccggaactcacagcgagtttgccgagtcgctcgaagacgacgatctcgacgccatcgaggcctccctcccaccttccgatggccagtcggccgagtcgcgccacaaggtcgcagcgcttatcgccgccggcggcctcagcaaaggtgagtctgccttgggtcttcacccctcgatcgactttgctgacccgccattcttcagtcgcgcggcttgacacctgtgtgaccgtcgtgtcggccgtctctttcctcgacgacttcgacacggaccactttctgtcggaccggcatggcgaccaggttacgcccgaggacgagcgcaacgtcaccgacctgttcgtccgcctctggctgcggtgaccagctggcgggccgatctgctgacatccgtttgcgccttgaccgactccgcaggctcgtcgaccaggtcgagttcgctaatgtcgttttgatcaacaagactgacgtctgtaccccggagcacgtcgcgcgggtcgaggcgctcgtccgaacgctcaacccgtacgttccaatctcctgcgctcaggtctgtgttgagggtagacggctgaccctcaccctcgctcaccttcagctcggccaaggtcttcgcgaccacgcggtcgcgcgttccgctcaaggagatcctcaacaccaacctgttcgattttgagaaggcggcgaccggcgcgggctggctgcagagcctcaaggaggacaacatgattacgcacgtcgccgccgacggctcgacgcggcggatcccaaagcccgagacgctcgagtaagtgtcctctctctgtcgctccatcgacgtgacgttcgctgacgccgcagcgtctctcgtcgcaggtacggcatctcgtcttttgtctaccgcgagcgccggccgtttcacccggaacggctctgggagcttatgtgtcgaccttttgctgtaatccagcaggcggcggacgaggacgacgaagatgaggacgactcggaggcggacgcatcgggggacgacgagcccgagccgaccgccgccgagttgctcgccgaggagaaggcagcgctggacctccctgcccgggccaagtttaagcgtgagcacccggtttggaagacgctgctccggagcaagggtgagtctggccctgaagactgcctcaaagtagcgatcgctgacccgcttctcgtcttcaggcttttgttggctggcaactaggaacgagcactttggcgagtggagccaagccggcgtgagagtggcctacgtcgcgcagaaataacagttcagacactgaccactggccatctcctggctctcagatcatgttcactctgtcgggcggcggccgctggctctgcaccgagcccgaagacagctggccgatggctcacatcccgtcggtcaaggcggcgatcaagaaggacttccagggcgcttggggtgaccgtcgccaggtgtgtctctctgctcttacatcccaactaaggctctgcagtggctgacgggatcggcgcactcaatgcgttcacaggagctcgtgtttatcggcgagaagctcgatcacgacaagctcaaggccgagatggacgcctgcctgctcgacgacaaggagtgggtcaagtggcagcgcatcatgaagagcaagcggtcggacgaggccaaggagcaggccctgcttgacatcttccaggacggctgggaggactgggccgaaccagaggtgcgcacaacgacggcccttcacatcaccaatcagactggatctgacatgcctccaccctcgtcgaccgcgcaggacgaggatggcgagcagcaagccatgcccgtcgctgcgccgaagccctcgaaagcaaagggcaaggctgccgcgctgccggccaaggtcgagacgcgctcgaccgtcaaggaccactcgggccacaagcacagcagcaaaaagcagaaaatggccgctgcgcactaagtctgcatctttcacgcccgttcgcgcaccctcttgtaccctcttagccgccgaattcgatgacgtttcatagaagcgcagaggggacaagcaacggatgcaaacagattacgagagagagaggagggcgatgcacaaacagacaggtcacagaggagagagagaggaacggagggatgggataggtaggaggtcaaggaggacgacgtgccgctaccagcgggcaccgccgaggccgccggtgggcgtcccgccgccgagattggagcggacgctgctggcggccgagttttgcgagccttcaaactgactgccgtttgtccgccaggtggcggtgctgtcctcgcgcggccggccctcggccggggagggcggctggccctcatcgtcgtcgccgttgtcgacgacgcggacgcacgacaagcccgaagcgagcatcaccatttgctcgtcctcggtccatggccggttggcgcgctcgcgctcgtactcagtcaggtgaccccggccggcgtcgccctcgtcctcgtcaaagtcgtcgtcgagctcgcctcggcgccgaaacacgtcgcctgcgtcggcaaacaggtggccgttgccgctaccgttgctggcctcgggcgaagctgggctgccgcgggcggtgaggctatctacgcgagttcggccggcccggcgatcctccttagccttgcgcatgcggtcgagctcggcctcacgtcggacctcccagctccgctcatagtacgtctcctcaagcccgcgctcgtcctcggccgtgatgacactcgcagcgttgtcgagctcgtggttgatggcctctttgcttgtgattgtccgcgacgacagctggacgagcgaagccgtcggcgtgagaccgccgtcggccgggaagaactcttcggggtcgatgccgacctcggcgaggacgtcgacggcctccatgtggtccgaggtgttcaccatccggtgagcaaaggtgcacgtcgacgcgttgctgaagacgaactcgccgcctgacagtcgagacgggaagaaaaaagtcagtccttttgtcttctcgacgacaatcgagcgcagccactggaacgcaccgagctggacgagctttccaggatcgcgaagcggcatgcggaatagaccgttgccgatgccgcggacgagctggccagggaccgtgttgacgttgtatcggctccggtcagcctgcttgagcgagccaaagtcgttgttgagtagtgtcatgccaaggtagttgtagagccgtcgcggcccgtcgacgtagattgggaaggggcaattgaagatctctgcggggcgcaggaagcggccggacagagcgcggtcagcttgagtcgaccagcctgataagcaaagaggacgcaccacggtacttcttgatgatctgccagtggccgttggagatgatgacgacgtcaatcttgtgccgctcgaggacggcagcgtcgagctcggggatcgagttggccatgtagtcctggcattggcctgcaaggatggcgaaaccagtcaatgaccccgccagcgaacgcataaagacggaggaggactacgtaccacaccagaagtggcggatgaaaaagacggccgtccgcctgccgccgtcgccgcggatgatctcgctaaacggcacaaagtggccgtcctcatcttgaacctcgcacaggccagcctcccacatgcgcctcgtcgagggcaggctcgagggcgaaaagggctcgacctcggccgagccggccagccgctccttggtgatcttgttcttaggcaggtcgacaaaggccagctccgactcgagcgaccaggtcgtcgaagggacaatcggcaggagaggcgagagctcgctgtcggccgctgccttcttcgccgccgcttttctagcttgccggccggactgaacggcgatgacgccctcctcttccctctcgcgatcggcctgcgcttcgtgccctccgctggcggcaccgttcatggccttttgccggtgaagaaggtagagctcgcgcttgctgtgatggtccttggctgccggcggcttgaccttcttgtctctgcctgggacagtcggtcccgctgatttcacgtctggcagcggcctgccgtgccgatccgtcggcggcgctggcggcggatacgtcggcagcatgttgtcgctcggccggtcgactggcaggaggtaatgctgctgggaggaggtcgaccttggcggcggcgagatgccatcgacgcgaccgtgcccttgagaggacaagtgaagtgctgacgtctgcgttgccaccgactgctgctcatagtcgttgaagggagcaagcggcggcgcagccaccggacgaccgccgtggccgaggtcgcttccgtggacgggggttgacgatcggagaggtgaggcgaacccgtacgactgctgctgctgctgcaccgtcagcggccgtccgttcgaggagcctgacgacggctggcgcgacatgcgcggcgctgctggctcgacagggctgttgcccatttcgggcgagggtacagggatccgtcggaggtaccgcgagggctggccggttccgccgagcgaaggcgaccgcgagtggccgctgccaccggcgaggtgggacgaggcggtcgaggctgaccgcgaatgatggccacctgcgctcgcctgagcaatgctaccgggaccgctgctgctgctgccaccaaggccgagggcgccattgctgcttccgaagcgggtcggtgagggtgttccccgaggatagtctgcgtcgtccactgaaggagtaaagtcccggccggacgacggcgaagcgtaaggcatcgcgctcggacgttcgtctgttggataagtcgacgagagggagtgtatcggcgaagggttttgaggatggcttgaccggcgacagcgaggcgatgggatggacgacggctcggagcgagatacgaagaagaggggggtctcggacgacgacggcgtccgcggtggctgaggaggcgactaagctggcgactggaccggggctttaggtcctctttggggacctctgtttggccttccgggtgtgtgggctgatggagcagcaagggctctgacgacggagagaggagagaggagcagcgagaggtcggtcggaggaggtggccggccgagagcgagcgacggttgctcggtaggttgctaagcttgcgtggagatccggtcgctgctttcgtaggcgggcccggcgactgcttgctcgagcgatgctgctgggctggctggccttgcgggcgggcggcggtctcgacgacggtcttgcttgtcgagggaaatcggaggcggtacgggctaaaggcggggcgctgcgagtccaggccctgatatctgcgacacttttcctccgcaagcggcgacgagaagagcgatcgaatcgacgacttccaccgcggcggcttctggctgcaggcgacgcgccggctcgactttctcgttgagacgcgcgcgagctatactaccttcataacagcgaccccttgccacggagtggcttatgtgaaattatacactgtaacccaggtacaaagatgcggtccgacagatctataaagagagagggaggagagaaagcgctcaacgccggctctcaggcgggcaggtgcagtcgaactcgatcttgtccctcgcctcgcgcgcggcccgcgtcttgcggtcgaggtggtagaagaggccggtcgcggcgatcgaggcgacggcaaaggcagcggcagccttgtagccgatggggtagttgggcgccttcttggccgggtaaatcaagactgagtaggaggagcgacgacgggtcagcgccgagagcgatcgaggtgcaaagcggaagagcgcaggacgtactgtttgcaaacgagtcgacagcatagacgatcgtgcaggtgacgccgatgataatggcccgctgggacgggcagggcgtcatgtcggccatccaggcgaccaggatcctgcgaggagcgtgaagcgcaatcagctatcagctggggagcgctagtcgtctagacttgaacagaaggaagcggactcacggtcccgctgagttgctgaggaagagcacgtgatagccgaacattttgaggccaaaggaggttggccaggctgccaggatgatgcatccgatgacgaccgtcgcctgctgaacgatgacgaggctcgcacgccagcccttgcggtcgctgagccagccaaaggcgagcatcgccaggatctgcagcacgtctggagcaatgagaatgaggatgtcagcggcgcgagtggtgttgcagccggccggcgagtgtgctaagactcacaaccgccaatcgggatggcgttcagctgagggatggtaaagcgcttcgttccgtcggcattcttgacagctttcaaaaagagcgacatccaggtcgaagaattctgcgaccagccccagaagctgaggtgttgagcaagaggggcgagcgagtcagcagggcgctcgggcgctttagtacgggcgggcgaacgttggacttacgcataggcagccgtgaagacgtagattgtccaggaggtgaagactttcttgagcagcgagcggctgaccttctgtgaggtcgcgcaaaggggaaagccccactcgggtcagcgccggctttgtgtgatcacttccaacggcgtacgcactcgcgcaggcagcttctggacgcggtaaacgcggatacgagcgatgtcgcgctcggcggcgttgagccagcggacggtcgacttggccgggtcgtctgggcggtggaagacgaggagacggtgcttagctaggatcctcacggtgtacacggcctcgtccgtctgactcacctgggatcaggatgaagccgaaggcggcgacaaagatggtctgagaggtgggagggggcgaggtcagatcggtgccctggtctgcggtcagagatgaggttttctcaccatcagggcgttgaagacaaacaaccactgccagggcttgagcatgccgagctcgcgggccgccagggcgctctgcatcgacgagacaaagatttgagctccctacagattgaagtcgaacggcgggctgtcagcgaggcgtttcgatgcttgcaaagcgtccaaggggacgcaccgggtaggaggtgccaaagatagcgatgcgtgtggcgagctcggccggggtgtaccaggagcacagcacggagatgatgcccttgaagcagaagcaatgagtaggtcgtcagcgcagagcgagccattggacaagggtgtctcgactcaccgggtaggacgacgcctctgcggagcgatgggtgacggggcgtcagcagcgtaaccgaagccggcgcgatgatcaggggcgactgaccaaagacaccgatgaagaagcgcaggacgtagatgcccgtcgcactcttcatgcaggccatcaggccgacgcagacaccccaggcgcactcgagggccggaagccagatgcgggtcggaatgcggccgtcggcgaggacgagttgggatggaatgaggaagagagcatagccgacgcggaagcaggtatcaaagtagttgagctcgttgccggtcagattgagctgtagggagaatttgagggtcagcagagaagacggaggcgtgcctcgaaggcggcctggaacgacactcacgtcctccttcatgccggagacgtaggccgtcttgtagttctgtgagagcaacaggtaccctaagcgtcagcacaggcaagggctgacggcaccagcggagcaggatgtaccgagctgtcgatctgcttcaggcagtaggctgcgagaggaggagggcaagaggtcagcttccgacgctcttcccgctgcttcataggccgactcaccgaaccacgaccacgacagcagcaggaggtcgagcttccagaggaagcgacgctcagtcttgacctgcgcaggcgtgagctcctccaggccgtcgtcgtcgacaaacgactcgtccgaggccgaccgcttctcgacatcgagctcctggtcgagcttgtcgtccagcgtcggctgcgcgcgcgcggcgtccgcgtcgagcttgttgagcgccggcagggtgtgcacggcgtcgtcgtcgttgagcttggtgttcatctcgaccgtcatgcaggagtgtggcaggtctgaggagactacggtgctggcggttgagaggatggtttaaagcgtggcgaagccgtcgaagacgcttggtcggcgcaaaagggtacgcggacgaggcagtcgcgggccaagccgaacagtcggcgcgtcgccagttcgccgcgcagccgcgcctgattgctcttcacgtcgagaaacgattgcttccggaccagccagcacgcgagttcgggcggcaaggccgagtgtgcctgcaggtatagcagcaacgcgagcaaaagagggctgggcacgagcagtcgagcaatcctcctggcgtcgagcgggggcagagtacctgcaccagatcgatccgcgattagatcaaggggcagtgcagacggcaacagcgcaagtctcgcctgcgggcgccgtagctacgacttgtatatagtcgggtcagctcgggtcagcaccatgcggccaggcgctaggctgccttacgacccgcaaggccaagatcgatgggcccgcaggcggtcggtcgtttcccagctcaactggccttgctccttctgagctaccgctcgaccctggcgtcgacctcttcctcccttcggatgctgttgctgacgtgccattctgccgatggcttccttcccttgataccaacagcgtatgcactctgctcggaaatcgcatccggcctcgagtcgacgcgcaacgggtctcgccgggcggtgaaaggggcagcaaaagacgacggcaacggcgaccatgcatcagcagcagggggcgcacctcagctcatccttcacggcctgctgttgccggcgaaaggagcgacagggcgaacggacttttcatgcgagcggagcgtacttaagtgccgaggcaagagtctcagcagccgatctttgcgcctgcgggccgaggccgtcccgcgtctgtctcgccggcccgcatcgggcccgcttccctccgacgcctcgcgccccgcctttcgccacgtcgtcgactctcgcctgcagagggcccgtccggagaatcggtgcagcggagagatcatactgcggcagcagagtctcacacgctttggctgggcgacacaaggatagccagggccggcgggccgcgaccgacggcgggtagggggtcgaagggagtctccccttgctgatccctcctctcttctagtcgccagcaccgtcgacggctgcgaacgggtgctcccttccctcccctcctccttcggtcactcgctcgcgcgcctcatcgctccagcggctggttcgctcccacccgccattgcctggacgcagcaaggagccatcctccgcctcgacgaccactctactaaagtcaaagtgctcctctcaagctcaacctactatcgtccgccgctcccaccaccagtgctccccaagacaagcctcctcgtgcgcgccttgcctctcacgctgctctcggctgatgcctccagctaacatgatgtaccctccttcgctcgcgtagacaaccttcatcggctgccttcacctcatctctccaaacgcagccttctccccacgccttccatgtccatcgccgcattcgagagcccaatccccgtctcaccagccctctcgtcatcatcctggtcgacgacctcttccggtcaccaccgccctaggaccgtccgccgcaagcccgtcccgcaggcgcttgaagcacccgccttcgccttcaacttctcctttacgccgccgggctcgcccgacgtcggccccgtgacgcccggaccggcctactttggctcctcctcgccagcaacctcggtcaactacctctctctcagctcaccctcccaagctcgcgacctcagcagtccagaaatgcacgacgccgccagcagcgaggatggcgcctacagcagcgacgacgagatccgcgccgggagcgggcccgtccgcggcggcggcctctttggcggcttccggctcgagcgcgacgagcgctatgccaatccggcatcgcaagctgtcgccgagccttcgaaaggccgcgtgatccgcgaccctgagactgtcggtgagtatcgtcttggcgcgcgtcggctccctcgggcgaagccctttgctaaacctcatcgctttctgtcatctctagagcacctctttggcgcgtcgatccagcgctcgcggcgcacgtcgcccgtcgtggactcgttccccgacgtctttggctctacagccgagcaagtggaggtccttgtcgacgagtcaccggccgaggtcgagctcgactatcgcgagaccctcgcccagcgggccaggcctgaatcgtcgtcgtcgatggcaccgtcgacctcagcatcttcggccgcgtccgtcacttcggcccggacgaacaaggtgcttaaggctcggcgagcggccgcagcgaaggcggcctggaaggacgagtttgccgacatggcggccgaggagcgcgtcgtgcgttcagtcaagaacgacgccccggaggctttcgtctttgagcagacggaagacatgttgaagcagtcgtctcgtagcgggcggacgcgcgacagcggcaagaccagcaactcgcctgatccaattgccgacgacgccgaggtgactgcggccgacgagaacgacgaggagaccgtccttgaccgcttccgcaagagcaagcgccacttcaacatgcacctcgctctccccggtacgagccagagctctcggccctcatcgccgattagtcacggttcgatcggctcgccctcctcgctcggcggcgagtcgccccggatcgttatggcccgcggcggcacctcttcgcctggaggccgcgatgcgtcgccttcgccgtcgttcaacggcaagctggcgtctggctattacggcagcagcagcccacgcctcgacctggcctctgcccagatccttttccaggatgcgatccctcgcatctgcacgccagagcctgcggccgactcggacgcgccgagcaacggaggcggtggccaccaccgggcgtttgactttctccatggcaacaaggccgagccaaaggttgccgcaccggcccaccgcacgcggcaccggtcgaccaattcagtcccaggctttggcctgcgcgagctgcgcgagatgcgcgaggcggccgacgtgatcgagcgcgacgctcggcggccgacgacgccgctctctcgctcatcgagcaccgccgagaagaagctcaagcgcaagccagtcccggctttcgcaggcgactttgacgacgagccgctcgctgttacggtcaatgcgaccaaggcgagcggcgcctactttcactcgagcttcgccattcgtccgagcgactcggccgcacctggtggggtcgtctacctctcggtcgaccagccagaagcgtcagacgattcagcgcggaccagctgtgactcgctctcgtttcctcacacgcccgatcagccgaccgagtttggtatgcttgcgccctcgaggcagttcggccgccggcggtcggtctccctctcggaccttacgacggtcgccgcattcagtacagtcatctcggacgcaccgccgcctttcgaccaagaggagggcctctcctttagcgccaaccgaccggtcaaggtccacacgccgcacccgcccgacgcggacggcgacgccgagacgactcccccggcttcgcacacctccttcttcgacgtcgtgaccgcatcgcatgcgagagctgccaagcagccggcccgcggcaccgagcgcggctcgccaccttccttctcaaagtcgtcgccgccggtgccggccatcctctcgccggatcagcgcaaggtgaccggatcgtggatgccgcactcggaacgctcggtcgaaccgagccccgcgagcaatccttacgccccgcgcgagcgcatgacgctcggcggtctacgccgaaaggtcggccggtcgagccctcgcatctaagctcttcctcttctcctccctctgtgtacccccgatctttgtgtctctctgtatctcacccacctcactccactgctcctagtctctgcagccggccttctttcgctctgctcatctatcgaatttatatctgccactcgatccgtgagccattggcctcattcccttgtgggctgttgctcgtggcaagcgcgacggccgtcgttacgcgcaagccgttggccgaccttggacgcgctgcgacaggagcgaaggacgtggtcctctccgtggcgacgcaatcgggggcggctctgccgacgagtcgtctatgagcacgcatgggccaacgccgcgttcctcgccagcgacgaacgggcgacgagaggcaggttgacgccgacgtggctcaccggtgcggcggatcaggccctactttgaacacagtcgacggcgattcgacttgggtggctcggttggtggttatgcggcgcccttctccaggttgacaacaggctgcggactatgagagaggcacgtcaggtcagttcttgatgccaagatcctcactatgtagcacgaggtcaggaacgcaccgcttgccaaagacgaccttagtccggacgatgccgacgcagtcgtaccgggtcgcgcgcttctcgccgttggcagccgtgacattgctcgtccgctgacgttttgacgtgacctcgggtgtcatcgcctgctggcgcttccgcttcagcagctcggccgcgctgacggagggcccgtgcgaggacggctgcattggcgaggacggctttgggcggtacggggacgaggccggctcgatgtcggacgagtagtcgcgagactgctcagatccaagagcacgcggatgccatcagcgacagtcattgggtagcctcccgtctgagcagctcgacgcaccttgccgggcgcaacaggcatcgggctactggccggtggagcaaggttcgtagttgctttgggcgtctcgtcgaggtctcgctcggcttccagctcgtccgcctcgggctcaagctgaggtgccttgcgcagaacggcaaacggctttgggagattgacgaatttgccgtgcaacaggtggtgcgcgatcgtcagagtgggcagcggctgaggagaggcaaggtaggggcgggcgagccgaggtcggtgacggcagcggcgacaggacaggcgtcagctagacatacgaggaggatgacgggccaaggcaaacgcacgccttccatcccaagccggccgattagctgtccagcaacgtcgccctccgactcgaggacgccctgaagctcgatcaggaccgtctggccgccgagcttggcaaggattggtgcacgcggctcggtcgtcgactcgctcgcaagcgggctaaggagcgcaggcgggatgtcgatgtgaatccgcatcactgatcggtgggacgctcgcttcgagtgcgagtggataggcggtctggagaaaggtcgagcttttgtgagggctagtaatggagaagaggtgagtgaaggtcgacggcagctcgaggtcgtctgtcgcgtcgtcgcgtcttcgagcccaccccgcgccgcgcagcggatcctcgactgcagcatggcgtccgtcatctcttgattccgcgggccggcacgacaaaaggaacatgggatgatgctgcagaagatgtggcatgcgtgtgaggattggagactgaaggggccgcagacaagcgggaaggaagaggaaggtgtttgcgcagcggcgaatcagaggacgagtgcgagcaggaagcagcgacgggcgggcaagcaagcaagggatgatgcagagagtggaagtgaggggtcgccttttggccgaaggcgttacattcacgctggcgttggaaggcagacgggtgcgagcccatcagtcgctgtcgtcgtctgagctgtcgagcgtcaggtcgagctgctgctcgaggcttcggaacagcgagccatccggggcgcccatcggccgagttgccggggccgcctgcggcttcgagtgaggctcggccgccttcgcggcaggcttgggcgtgctcgccgccggcttgggggtagcagcggcggcggcggcaggcttcggggcgctcgcagcggcaggctgtgcggcgggcggcaccggcatggccgccgcgggagcgggcgaggcagcgggcgtcgtcgactgggcgagcggcgatgcggcacgcttggccggcgtcgcgggcgacggcgcagcggccggcttctcgccgtacgagaacgagaagttggatagcgcctgcttgggcgagggagttgtggacgccgccgcggtagccgaggccttgggcgtcgccggcgtgacggttgcgatcggcggggcgggcgaggcggccttgtgcgcctcctgaacgatctgcgagccctgcgactcgggcgtggagttgccggcagcgacagcggcggcgaggcccttctggtagtccttcttgagcgcgagccactcggacccagggtcgttgttgcggcccatgcccatccggatgacgcccatgcgctgcgagagaggggaaggtgtcagcgagcatagccctacgagacggcagacgtcggagccgtacctttgcgagcgtgaagtagtcggccatgcaattgacgccgacgtcgtcgaggaaggcgaggccgttgccggcaagctggccgctcatcgtcttgacgtacgtcgccggcgtcttgttcggcatgctggttagtagacggaagggtcgggtcagtgagagccatcagatcgaggcgccctcaaagcccagccagcgcacctagccggcggcagcttgctgagcgctttgatgagcggttcaaagagctcggccgttttctccgcatagggcgggaccttgccgctgtcggcgctctcgacgacaatcatctcgtgcttgctctcgcggtagcggtcgcggaggctgatccactccttacggcccttgccggtccgggcgggcgcgtcgccgaggtcgacgatgccctcgtcctcggcccgggcggcgtacgacttccagccgtaggcctcgtagatcttgggatgcgaggcgcgcaggagggccgagacgatgtagcgcaacggcgccggcttggccgggagcgtcgacaagagctggatcagcggctggaagagcttgatcgcggccatcgggtcagggttctcttcgagcgccttgttgagcgcatacttgcgtgccggcgagctgttgatgccgtcgtgctcgctggttccggcctttgcgagctgtcggacggcaggcgaggccgacccgccgacccgaggcgatgacggcgggctctcggcccgcatttcgtcctcctggagcgcgccgtacgggttgccgagtccaaccttcgacgcccctggggcggcagacacggcgatgacgggcgagtcggactgggttggcggggccggcacgtcctttgagagcgacatggccgagagacgggccgtcgtcgcctgcgtcaaccggtcggctgccgcctgcttttcttcggccgccttcttctcgttggcgagcctcttctcctcggccgccgcgaatgggttgacctggtttggctgaggcggcttgacggggctctgcagtggggtcgcagtcagcagcttcgttgccgccatcttgacgggtgaagccgggctggccgaggcagcgactgtcggcgccggcttggtcttgtatgccggggcgagcgagatccattccatgcctagctgctcgcccttgccggcgaggatctgtttggttaggtaagggtcagtctctcgcgggtatgccagtcaaaaggcgaggtagccgcacgacgccagcatcaaccgcgtcggcaaagaactccttgctcgagacaccggcgccccaggtctcgcggttgaggaacgggacgatgtagctccgaagcggccggctcttaggcatgccgcgcaagacctcgacgaggttctggtaccgatctttcgtcttgcgcgcggcagcagcggggcccgacggcgacgaaaaggacgaggtcgagggatagatggccgacgacggcaggggcaccttcgtccggctgccgagcgtgaacggcgtgtcaagcccggctgccctgaggccgttgccgttcacggtcggggtggcgccggtcgtccgaatggcggcggccgaggtaggagtcaacgtgacggcggcgaggaaagcaggagagagcgggtccgagttcgcccggtgccgaccgtttgtcactggcgtcgaagccgtcatgatgcgcggtggtgcagcagctggcgggttgacggacgcgcccgttgggtcggccgtcgtgccggcttccttgatgagatctgcacaggcaaatgcgaaagccaaagttcagcggaacgccgcggccaaggaaggcccgactgacgaggcacgaacctctgaacttgtaaacacccttattcgcgctcgctttcagcgcctcggccgcacccatctggttctcaaacagcaagacgtcgtagccgctgccgcagacaggacggtcagtcagcgatcggcctgcgtttagaccacctccctctccctttagtcgaaacgtaccggttgcgcatgctcgagagcaggtacgagaagtctttgtcgccggacctggcaggaagagtgggtaggtgaacaggttggatcaggtacgtcaagaatgacagcagaggggctgacatgagacagatggttgacggcggcggattgtcgagcgcaaagagggcgatgtcggccatgatgtggtggtcggcgctgcgaggtcgacgacagcgagtaagccttcacgccgttcagcaggaccagattggctgcatatcggttgcagcggcccaaacgtacacgtctttgcgtccccagcggccgcagtcgcgaacttcgacgccgttggcctcgaggcccgagcggaggccggccgcgtacgagctctgctcggcaacgtcctggtagatgcgaatgaatgagatcggtccgtgcggctcaaggtaggttctgagcgtctggacgagtcgggtcgcgttggtctggagagagaccgagcagttctctggcaaggacgagcagacagcggtcgcgagggaccagccgcggagtcgtgcggcggtcagctcgggccgctctccgcaccgacaaccaaattgccttcctccgaacaacggacaggagcgtcacgcaccgtagtcccagaagacgccgatagcgccctgcgtgcggcctttgccggtcgcgacggcccgagtgaggcggacctgctgctcgagcagctcacgctcgcgctggaacgccaaccgctcgagcgcgagcagctggtgcgtcatctccagctccttgcggaccgtctcgagagagggtgctggtgtcgaggacgacatggttggacctgcgtccccttgctaggttaaagggagggagaggggtagcgagaggacgtcgtggtcgctccggttgcaagggggtggacaagggcggacgaggtcggccatcgcagggggcattcggaggcaataaggcttgcctccgagccctccagcgcggctgatcgttcgacgcgcccgtgtcccttgatctcctccctcacctcctccgcctctccctttctttacctctttttattctttctctctctctctttcagcatgcccgctcagtacacgcgcgagcggttcgaggccgtcttccctgtcattgccgacgaggtgcttgcctacatggagcacgagggcatgccgcaggacgcgcgcgaatggatgaagaaggtccgtcgccgagctgcctgtgaccaggctgaagctggtagctctccctggagaacgaggagctagctgacattgtccgcctgacggtccctcgatcgcatctagaacctctactacaacacgcccggcggcaagctcaaccgcggactctcggtcgtcgacacgtttgccctcctctcgggcaaggacgagctctctgaggaggagtactttaaggcggccgtcctcggctggtgcatcgaactcgtgcgtcgctccctggctcctggaagggtggcctcaggcagcatgaaagctgaccttggccgttgtcttcgcgcctccgcccgctcgcccgcccgcagctgcaagcttacttcctcgtcgccgacgacatgatggacgcctcgatcacccgccgtggccagccctgctggtacaaggtcgatggcgttgccaacattgccatcaacgacgccttcatgctcgagggcgccatctactacctgctcaagaagcacttccggcccgagccctactacgtcgatctgctcgagctcttccatgacgtgcgtcgcctcgctttggcagcggctgctcctcctccgacaagagtcgccaggacgggcgctgatccgtcgcatcactctctcctgcgccctcttgacaggttacgttccagaccgagctcggtcagctcatcgacctcatcacagctccggaagacgacgtcgacctgtcgaagttttcgctcgacaagttcgtccttgctcttccacactcgaggccgctccaagctggtccgcacagaactgacgtcggtccgcggcctgtcgctgctgttcatgttgtaggcaccacctcatcgtcgtctacaagacggccttctactcgttctacctcccggtcgctcttgccatgcggatggtgcgtcagcgcagcccgacgagcaagtcctcttcgggcgaccgcatgctgacgcagacacctgcgcttcttcccgctacccaggccggcgtcagcgacgaggccgcgtacaagcaggcgctcgacattctcatcccgatgggcgagtacttccaggtccaggacgacgtcctcgacgcctttgccccaccggaggtgctcggtaagattggcaccgacatccaggtgcgtcgagcggcggccagcctcgcgtcgtatgtgcagcttcaactgaccacctccaccccgacccccctccgatgcacttggcaggacaacaagtgctcgtggccgatcaacctcgctctttcgctcgcgtcgccggcccagaggcagacgctcgacgtcaactacggcgtccgctcggccgaaaccgaagccaaggtcaaggccgtctacgccgagctcgacatccaggccaagtttgacgcctacgaggcaaagtcgtaccgcgagatcaacgaggcgatcgagcaggtcgacgaggccaagacgggcctcaagcgcgaggtcttccgcagcttccttgctaaggtctacaagcggaccaagtagatgagccagcgcccacgtcgggccgcacctagaatcgggggatagccgaaggaggttgcatctcgaatggatctcgtcttcgcttgcctcacacgaggcactcgaaggtgacagacggatagggaggcttaaaagacgcctgtccgacactctcgtcttgcgagcgcaaagttgtcatttcaattcggggcctgcaagcagcgatcagagctcctcgcggaccttctggacgacctgctcgctggtgctcttgacggcctcgtagacctcgccgcccttctcgacggccgcatcgtacgcctcgccgcccttctcgacagcagcgtcgtaagcctcggtgcccttctcaacggcagcatcgtacgcctcggcgacgtcctcggccgcgcgctcgaccttggcggcgaggaaagagccaaggatgttggctttgacgacgagctcgtccttctgggtcggcgcgagggccggcgaggccgtcagcttggcgagccgggcctgctccttgagcagccaggccttggcctcggtccccttctcggcgattttcttggccaccttgaggtagtactggcctgagacggacgaggcctggccaccgacagcctcgacagctgcctgagcgcgggcgagcaggtcgccggccgactcagcaggcgcgacgaggaagtcgggcgtaaaggcgtcgagcgacgggatcaggccggcctaagccaaacggcaagcatcagagtcagcaggcggaccctctgtacggtcagacggagcagacgcacgagggccgtgaggccgccaccgacggtccgggccgtgccggcgtgctcgttgataaagtcgacaaaggcttgctcagtccgggcggcgtcgtatgcggtcgggacaaagtcgacggccttcttgccgcgggggaagaacttgagcgtcgggtagctcttgacgccgtaccggttggcgatcgctttgttgcgagcgtcgtcggcgtcaaactgggcgacgacgaccgagggctcgttggcgaagtcggccgcgagcttctcaaagatgggcttgagcgacttgcagtgctgtcgtttatagtttttgatcgaggccgagaccttggtccgtcggtcagcctcagagggcgccatcagacggcaaaggcaagttggggaaggagacgcacgccacaccagggggccgtgtaagcgacgaggacgtccttgtaagcatcaagcgcgattgagtcgtggttgccagcgtcgaggatggtggcgagcgacggcgtaggcgccttgatcttgctcttcaggccggtttgcttggtgacaaaggacgtgagcgagtcgaggtcgcgcgcgttggcgtagtcgaccggctcgagcgagtttggtggaaagtacttgatcgttgggtagcccttgacgccatacttcctgccgaggtctgccaggaacagcgagggcgataggcgagaggtcagccgtctggccagcgctgtcgtggcgagccggggggcttggtcgacgtacccttgccgacgccgtcagcgtccgtcttggcgatcacaacgtccttgccaacaaacgagtccgcaagctgctcgtagacgggagcgagcgtcttgcagtggccgcacctaaaaggacatccgatggaagacaagtcagctcctcctcgtctgaacgcgtcccaaccgacagcggctgcggagcgaggccgacatacctaagagacaggacgcaagccacaaagacaagacacaaacacaggtaggcatcaggaacggatcgccgggcagctccccaagccaagatcgggggtcctgtccttgaaggagcctgaagccagcacagagggacggaccagggggcgtaaaactcgacgagcgcgccctttgcgccgccgacgaacgagccaaagttcttgctgtcgaggtcgacaacgttggaagcgagtgccaaggtggggccgagggcgaggagggcgagcgaggtgaaccgcatcgtgaagagaaaggatggaggtcggtgtcggtggcgaagagatgtgacgaagcaggcgcgctctgtgcgggcaggccaggataatcgatgaggttcccacgacgccctggattgagattctctgcagacggtctccttgcagcccgcagctgaccctcctcctgcacctcttcactaacccccctccctctctacctgccatgtcattcgagaccgcctggggtgtccctcctgcgtctctaccgacgcccgacaagggctcggccaagcgcaagcgaccgtcggccgacccggcggccaaggtcgagacggcgtcgatcaacctcgaaaagctcatgggcttgatggacaaggaggctcagcagcctaagccgccgtcgggcaaggacctcaagaaggccgccaacaagaaggataagccagcgccggctggaggatctcccgctcagcagcaacagggcggaccggccgcgaagcgccagaagcaggaccggccggcgccgacggttggcgcccagcagcagcagccccaacagcccaaggagcctcggacggatggcaaggctgagaagggcaagggccgcggcaagaacaaggcggccaagaagttcaatgcggctgctgctgcctctgctggcggagcggctccagctgccactgctctcccgccgcacatggacgtcgacgagccgtcgacgtcgacctcggccgcttcggtcatcgcgctcaagccgctcgcaaacgcctcgcctgcaaaggccgctgccgctccgccagcgcagtctcctgctgtcggcggcgagcagaagaagtcgaagaaggcgcagaagaaggagcgccttgcggccgccgccgccgcttccggatcgtcgacagccgccgctgctccagccgctgcgccctcgccggcgccagcgaagaaggccgagtcgaagaagaatgttgttgtgctcgacgaggagccagcatcttccgcctcggcgcctcccggtccggccgacagcgctctgacgccgatgcagcttaagatgaagcgtaagctcgagggctcgcgattccggtccgtccggcgctgggacttgccaggctgccctgctggtactgacaggtctccgcctcttgtagttggatcaacgagcagctctacacgacctcgtccgaggatgcactcgacatgatgcgcaaggacccgaccgtcttctccgatgtgagtctcccgtcgtcgctcaccccttcgagcttgctaaccatgtccgcccttttctgctgcaaccagtaccacgtcggcttccgttcgcagactgagggctggccgacgtcgccggtgacgttgctgacggacaagctgtcggccgcgctctcgccgggctcgctcatcatcgacctcggctgcggcgacgccgcgctcgccaagacgctcgtcccccagggctttaaggtactctcgtacgacctcgtcggcgatgcctgggtgaccgagtgcgactactgctccggcatccctctccctgggtccgaggacgtcgagctcggcgcggtcgaggacagccggatcgtcgacggcgccgtctgctgcctgagtttgatgggccgcaactggatgcagggtgtgcgagagattgctcgcgtcctccaagatgggtcagtctgctgcttttcctcgatcctcccggccggtccgaacgctgaccctacttcgctctttgaatgcccgcagcgccgtctttgagatcgccgaggtccagagccgcatgtcgtcgaccgacgccttcgtcgagatgatcgcgtcgcttggcttcaagctcgcgtccaaggtttggctatcttactgatcgcttactcatcttcggtcccgctgacatccttgcaactcccgcaccaggacgagtccaacacccactttatcttgctctcgttcgtccgcgagggcgagccaacgtgggccgccgacggcgcgacgtgggaggaggttctccagcagggcgaggaagtcctcaaggcttgcgtctacaaaaagcgctgagaaggcaaagtgatgctcatggacgcttcactagattgtccgcctcaggcttctgctcgtctgcgtagtcagttgataaaggagaggggagagggactggtcggctcatgagttctgaccggcactcgtctgcgccgactttcacctgtgaccgtcggtcgctcctacaaggtctctccccgcttgtcagctggccccatctccatcgccccgctgccgtactagagctgactgcgggcagcggtcaaagtctagtgacgacgcgtccaagagtatgctcgaagcggccgacgcgcgcgctgtcctgtggctgccggccggtgttgggcgagcttcttgcctccaaccacagtctcccctccagccagctctcgacgacctgccacctcacgcacgaccttctcaagctcgaaacacgcgctaccaacaccgacaccgacgacttgcgacgcatctaaaccctcactctacgactcgctcccgcagcgacgcccgagcctaaagggccctgtcacccggtcccctcgagccatgtcccgcttcaaacagtgtgcgagagccgcctaccctcctcagctcgccatgcgctcggtgctgactgatcgatcctgatctctgccagccttctcaaacgtcctctcgtcggcgaccagcaagctcggcggcatcagctcgcatgctgggatctcgtccgcagccagcggtgacgccgacgctgctggcccgtcggccagctcgagtctctacggcaagaagcgagggaccggccagctcggtgcacccttcaggagcctctcaggcggtatcggcaacgttcagtcgtcgagtgtcgactcggaggtctcgtggaaggacattggcttgcactcggccgtcgtcagtgtcaccgctcccccccccctttcggctcggccaccagctaactcgaaggtcgtcttcagatgtttttcacgttcctcggtatctgctgcttcgccgccgtcgccgccttccaggccaagtggaagattggcgtctgtacgtcgcccctgctcgccttcgagctcaaactctttgaccagctcagacgctgacttccccttcccaacgcgcagccggtctctcgggctttgccctctttgcgtcaatctttaccttcttgacctctgccgtcatgctctgcggtccctttgcctacgacaagtgagccgtcgtcaattcttacggcgcagtagagcgtccccgtcccccctcttggccggctctgacacaatctccacttcccctcatttgcgatcaggtgggacttcctccgcggcccagctatcttcctcagggtcccgcggacgattctggtcctcgagtcgaccggcgctctgtggtccgtcatccttgctatggcgacgacgatcagtgccttcactcagccgggctgcaaggcgccagccaacgacccgcatgcgagcctcggggacagctacaagagcgagctcgccggttggtgcagaaccaagcgcgccggtagcgtcttcttttggctcgcctttggtgagagaagttgcctctgtgtcgacacggaagccgacgctgatacatcgacgtttggccgacccccctcattcagccgcttggggtggtcttctcggcttcactctcttcaagctcataaaggctcgtcggacccgcccgcgagacgagcccttcaccgtgccgggctcggcgaccgaggccgacttctcagcttcgttttccccgccgcgagcccagaccggcgccggcgccggccccggttacgctcggccaggccaggacgacgacgacgacgttgatggggcgagaagtccctttgccgatcgttacgcggacggtggcggtcgggcgagcatcgatccatacggcgcgtttgccggcgacgtccctgaaggctacagccagcctagcgggccagggatgagccggacgatgcacctcgccacgtatggcggtgcgacgccgacgcccgaccccttctccaacatccgccagtcgctcgtctcgcccccaccgcagctgccgccgctccattatggcctgacgccgacgccaccgcccgccggccaaccgctcttctcgcttccaccaccgccgccgccaatgtcgacgccgtcaccacacccctacccgggcgcctacccggcgcacgccccagctcaaccgcacgcctactctcacgcacctgcctatcaggtcccgcagctgccgaatcagcagccaccgtttaccgacccgtacgctcacgcatacgccgagcctcatcagccgccttatccgcagcaggccagcggtggcttgccgcaaccgccgcactatgctcagcctgcgccagaaggctggcagtaaggtctgctatcttgcacccttggcgggcgatgcgctgaagtccttggacgagcagaggcatgaaatcattaagagcgcgcggtggggaagtcgtacaagcgcgcgatggccagagccattgagcacacagggtgtcgtgacgtgagggaggggaagcagggcgggcgtgcgcgccttttacgccgtcaaggcggctgggtcggcccgaagaggcttggagatgagccgctcgacctccttggagacctcgtcattcgtcgaccggatcgtcagccggcagagcttggcgtccttgttgggctcgagtcggagcaggcagccgaccttgccgccggccgacatgtgcagcacgccggcggcgacagcgttgacagggttcgggtcgatctgaagacgagcggcagggtcagctcgtgatgctgacgctcgcagcctgagaaaagaacgtacgccgtccaggagaccaaggtgattgccggcaatgaccttcgtgttcttcgcgacgtctggcgctccggcaacgtcgagcttgatcgggctgtgaagaaagaatgagccagatgtcagcggacggctttgcatgcacgcacaacggaccatcaccctccgacgcacaagatggtctgactctcgcgcggcgggccgccgatcagcttccagcgctcaaagaagacggccgccggcagcttgaccggctcgatgaaggaggtgatggtgacgggcaagcggagggctagcgtctgggccgagctggcgaggtacgagattcggacgaccggcgggctcgcaaagcactctttgcactcgacctggatctgctgctggacctgggtgagcggcgcgatcgctccgccagccagctgaccggccagggtggcgacgatcgcgtccgggctggccgactcgacggcgagcgtaaagttggcgagcgggaccgagagcttgttgccgacgtagagctgcacgcggccgagcgcgccgtggaactcggtcttgacgccgatctggagctgcgcgtcctcgtagaggacgccctcgccggtgtacgacagccggtcgaaccacttgtcgatattggcgcccgccgtcagcgccggcgcctgagggattccaccgagcagcgcgcccgggaaagcggatacaggcgaggtgggaccggtcaagctggccgaggctgagggggaggcagcggccggcgagctcggcagcaggcgctcctcttggacggcgttgctcgacaggtcgagaccggcgagcgagtccatgatgctgccgcctgcgccataggatgacggggcgacgcccatcatcgtcaggtcggccgacgcctcccgctggggcgtcgtgtaaggcgcttgggcagggtgtagcggcgccagtggcggctcaacgaccgtgggaggtggcgagcgcacggcaggcggggcagcaggagcagaagcaggagcgtcgccaccgttggagatctgcctcttgacctcgctgcgtcgttccgcccggccgtcgaggttccacgtccgcttgtcctctgtgtcgcggcccttcttgtgaagccgattgagcagcgccgactcgcgcgccgggaagggcggcatctcctcgaggacggcctggagaagctcgtcgtcgtcgacgcggccgcgctggacgagagcgaggtactcgcaggcccgctgctgaagctcggcatccaggacgtgccgatagcggtcgaagataacgacgagctggtccttgatctcggggaagaggtttgacctagtcgcgacattggtggtcagctattggtccttaaggagatggttcgagcagcagaggacgcaccacttgacgtaggtgctcaggagcagggcccgcgtcgaagccgagcagaagttgatcttggagtgaagcgcgttgaactggtcgatcggcgccgcgccgggctcgttggcgatgaggtggccaaactcgccgaggatgtaggccgctggcttgacgagcttctcgtgcgccgacggggcctggaggtagccgaggcaaatgcgcgaggcataggcctggaggtcttcggtgttggtgacgatctgaacgacgcggtaccagacctcgtctgcgacatggtcgccagcgagactgatgagcttgaggactggggcggcagcaatgaggtcgggtcgtcagaggctttgagcacgcctcgcgggggtgaagggaccaggcggacttactcgtgtcgacataccactcgtactccatcgcccacttttcggtcaggatcgcaatcttcagcaccatctcctcccgcaggccgtagtcggcgacgacgaggtacttaaggagctcgtcaacgatcgtccgagcgttgctcccgtcgcacatcgagtagaggaggtcgagcgcccgccggcgaaccgagatgtcgcggtcacggagcgagaggatgatcgtctgctggtgcttgcggacgggctcgagcgagtcggagcacgcggcgaggtgggccattgcgtcgaggccgaggtagcggacgttggtctccttcgagaggatgaagcggcccagcaggacggccgacgaacggacaacgtccgagtcgggattgacgtggatcgcgagattgatggcctcgaacaggatcgcatgctgcgtgttcgaatgctggacgttctttggcgtctcgcgcgagttgtcgaggatctggctgagcacctcgtcgagtgccttgcggaccgtcgcagaggctgacggcgggtagtgctgcagcaggcgcaggagcttgatctggagccagggaatcggcacccggtagtagtagtagtctgtcgggtggttgccgtcaaagacgagctgcaagacgggccgccagcgtcagtcgccggcctaaaggcaaaaggaagagagcagctgctgtggtcgactgaccgtctgcaggcgtgcgaccgcgatctggtagcaggactccatcgcccgctggttgtcctgggccatcgtcgtcacaagactcgtcacggccagagcgacaccctgagcggggcgcatggagcggtcagctcctcattcttgggtgccgagctcaaaagacgcacgaggttgtcgtcgtccatgatggtgacaatgcgctcgccccactcggccagcgggatgacgctcgggtgcttgcggtagagccggaggagggtgagggccgccttcttcttgacaaagggaatgctgacggggctgatgagcagccggtggacgtcgggcgcgagcgactcagccatctctttgccgccaatgttggcgatcgcatggagggcgaggcagttattgatctcggagtggtcgtcgaggtccttgcggatcgagttgatgatgagccggatcaggtcagagttctcatgcaggagcagcgtgagcgcgaggtagccctgcgcgggggcgaaggaggaggacacgagtcagcagaggagcacccgttgatgtcttcggaggacgacgtacgatctgcttctccgagtactttgggcttgaaatcaagttgacggcctccatgtgcccgacgtcgaccttgtagccgaggatgtaggtgaagacgaccttggagaggtacttcttcttctgatagccgtcgagattgccctctacgtcgggtcagaaggtgcacgagctcgcgaagtcagctagctgactgggttacgacgggtcggagggcaagacggacccttgaacttctgccggatgtgagccatctcgcgattgatgcgcttctcctcgagctcccggacgcgacatgcgcgcaggtccgagatgtactgtcatccggagcatcaggatagtcggatcaggtgcagaaagggatcgagggcgcgacgcaggcggcgacaggaggaaggggaacaagagaggagttcgaggtgcgtcagctcgttgcgctcggcgggtgcgatgctcgacggttgcagcacgcagacggacctgctggagaccgcggggagggggcgccatcttgtcttgctgctgctcgtctgctcaaggacggtccagacgtgtgcggagagagtgcggtgaaggagcgagactcgagcgctcggttgtcgtaggacaaggggacgaggcgcaggttgccggcgtgggcgcgcgggcgcggcgcgtctcgccctgcccccttctcggggcctaggctggccccaactgcaccgcttgggttttgccctcagcctctttctctcgcaggtgctggactactgccattgtcattcctcgttcacaagatcttcacattagcttcgagaagaagcccttggcggtcgactttgccgactcttgcatctgcaggcggaggacgacatgcggggggtccatcagcgccgtgccttcctgcgtgcagatcagaagcgacgtaccgccagccgcttggtctgcttctgccactcgcccgcctgtcgtccaacgtcgttcagcttgtctgacaggccgtcgagctgagatgaacgaagaggcggacgatcagcgtctcatccccggcgtgagaagcacgtgtctttgacgcaccatgttgcctcgcagagccgccgcctcggtcatctgctcgtagatgctctttccgccctgaacctcctcgggggcaatcgaagaggccgaagccgagccgcgagacgaccgctgagcgctgctctttgccatggccgccttagcgacgtccgactggacgcggttggcaacgttgccatccggtgcaccgccccacagcgaggcctgggccggtcgcgcggcaggtgcaggtcgcttgggaccggcgactgtccgacagtcaggaagggcgtcagcgtgggttgtacgaccatgattgtcggccggagcaggacccaccaagcgcgtcgatctgagcgccggtcaagacgcctccaccccagctgccgagccagctcgccaggacgctcgactgaacgggcagcggctgcgctccgagcgtcttgcgtggcgccgtgttgtccaggtcgaacgttggcgcaagagggtgagctccgtcgatattgaggacagagccgagcgagatagatgccgggccgaggatgtggacgtagtcgctcgaagacggcgagaacgagtacgcccctccgggcgggctgtcgggggtcacgcttgtcagatctttgtctggagctacagttgcttttgtcgcacgggacgcgacgtacgtgagctgtgcctggaagacaagctccaggccgggcagcgagtagacctctccccgaccagagacaagcgtgacgatgagcaccgtctgcccctcgcggcagatgacggcagccgctctgacgtcttcggtcacgtcgacctttgcaagccggtccccggtcaggttggcctgcgtccggatggatcgagcggcgacggcaacccagacagagtggacctccgaggagctggagctgatgacggactggccaatggctgcggagacgcgagtcagctttagacaaggtgcatggggtagtgacgcccggacccgcacctttgagccgctggaggctgacgacctgctcagtccccttggcagcgtccaggacgaaggaagcgactggccggacctgtgagtcgtgggtgaccgtgtggggcttcttgtcggccgtccaaccggccaggccgtcagagagggttgtgatgcgggtgaggccggactcgtagctggcgacaagtcggacccgaggagccgggtctgtcacgccagacgagttgcttagcgcgatcagattcagagctcatgaggccgcgaagacgtaccacttccgaggccgcagacggcaaacttgagagacatggcaacagcgccaacagatccccgacgctcactgcttgagccatcgtcaccgaagccctcgcggagaatgatttcgggcccgcgcaaatcaacgacgcagacagagtcctgaaggtacgagacggcgaggaagcctgagagtgaggcagcgagtcagcaagcgttctgcaaaggacggggctagaacccggttgactgaccggcatcgcacacggcacaagccgccactggcccgcgccgcacgtcgatgaggcacaccggcttaaagccgtcgacagctgggagggatagagacggctcagtcgtgaagagacgagttgcgtcgaagaagcgacgcactccaattcgagagcgatcgcaggtcgacgacgtctgccggttggacgccgccgagagacagaccgcccacgcgcgcttgcatctccatgtcctcgctcgcctcgctccagcgaaagtagacgacctcgcccgtcgcgaggacgacagcgacctcgcaggcttcgctcgcgaactggacgtcctggatctggaagcgggtcggatccgaccgcagcagtcgcgacaccggcagcgccgcgagcgatgggtgggcgaacagcggctggagaagaatcgacagcgctggcagaggcgcagggtactcgaacgcgagtaggtcgggaagagccaacagttgcggcgactgttgtgcgagagcgcgggcatcagcaacggcctggcctgagtcaggcgcagcgagagggctgctcacgaggtcgaagaagcgcgttgtgccgtctcggtgccagctcacgagcaagcggttcttctctagctgagagcggcgtgtcaggaacaggctgagtgtcagcagagggagctttccagaggatttttcgacgccatttagagcgcaccttgagcgtccgcatgttgggcgcgtgggctcccgtcgtcgtcgcatgcgcctggcctccctcgagcggcagacgcggcatgccgtcccagccgtcagcgcagccagcgtcccatttgcggagcttcgtgaaagcctcgcgcgggacgtcaaccaggtggcagccgagaagcgtgtgtgagcccgcccagaaggctgccgggaggcgatactcgccaaagccctcgctgccgacgatcggcgggagcgagcgcggcacctcgggcgtcggtgcgctgcctagtgctggtgaggcaaagccccagccagaagcggaggctggagtcggcgagctcgaagccatctgtggcgcggccgtcatcgggacgaaggcgtcgtcgcccataccgtactctttgcgctcgccgtcgcgaccggcggtcgaccggaccggagggaaggtcagggcgcgaagctcgcggccgctgagcgcgcccgagactagcggcaaagcacgcaaggcactctcgacgatgaggagcgcgacggcgtctgagccgccaccgaggaacgggctggagcgcggcacgaggagaaagtcctcgacctgggctcccgggagcgagctgtagaggaaagctcccgtcgcggtgagcgagtctcggaaagcagctctgaccgcagaggagatgccgtaggagcccgaaggtggtgcgaccgagactgggggcggctggtaggccgggaactgcagaacgttgagaccgggcggatggctcggaagtagaccgcccagtacgaggaggcactgcaaggcccaacggagaggtcagcctcggaaggccagtttgatcgacatggtagacgacgcactgtctcgtcccgagccgcaaaggccttggtctcgtcgctgacgacttcaccctctgcttcgagggcggccacagccgctgcactggggaaggacgcccacgacagtttgaagattggctcgcgcctcgggctcacgccctggccaggcggagcatcagggtccctgtcgagtgcgcctgagtcaaacagctgcagaggggaagcgccagcaaagtcagggtcggtcgctacatgaggcgagtcgcaggcgacgcacactctccgcatcggtgacgttcacgtcgttcatctcgaccgcccgcacgctcagaggcttatctggatcctcgacggcccagaaggcgatgcagccgtcctcgtctggtcgatgggatcagagtcagccggcatcaggcaatcatcggagatggctgaggacaacgcacatccgacggcaaagcagagtgctgagggatgccaggtaatgcaggtcactccaggattgcgctcggtgaagagatcgtcgtcctggtacgagcctccgcctggggcgccgggtgggagcatgagcgaatacgagtaaacggcgacctgcttgctgatgctccagaggaccacgccgccctcgtaggcgacgagcacctgatcgagatcacggggcgacacctggacggccacggccatggctctaccgagatatggaaagatgaagtcagcgctgcacctcaaagtcgggccggccccgccagactcacgtccgaggacgcgctggaaccggcacgcctgagcgcttcaggcggtcctcctgctgcgcccagacgttcgggatgcgatagggcgcgaggaaggcgttgcgctcgagatcgataaaggccgtcgtaccgtctttcatcgtcaccgggagctgcagtggagtcgggctgaggagcgtcaggaggtctgagcgggttggtcgcttcagggctgctgcgcgcggccgctgggctcggggacgtacatgcgacgtcgaaggcgagggcacgtcgatgctcgtcaccgtcccgtagagcgagctggtcgcctccttccaaggtaggccagtcgccgggtcgatcgtccgcaagctccagacgtgcgcctggctgcgggcatcgacggcgacgagccggcccctggacgagtggaaggcgaggtgcttgatcgcattcgacgaggacgacgagcggggtgtcggcgggtggaggaggaccgagagatggatgtggactggcctggcgccgacgacgtggatcgaaccggtcgagaggcctgcgagaaggggtcgagtcgaagaggggtaggtcggcgaagaggtcagcagcgactcactcgtctggctgccaagagcaaccccttctgccctcccgtcactcaatcaggttaaggaccacaggtgatcttcactcgcagatgccgagcgcatggagactaaaggagaagaacgtaccgacagcccagtagccaccgaccgggtcgacggcgagggcggtgatgtcgccgctaaggccgagctcgtcgaccgcgagccggaccgccttgaaagccgtcggcgtgcggtagctgccgctaaagtcggcctggaacgcaggcgcgcgcgacttgtgcttgaacatgagagctcaaacctcgcttgcgcgtgaagtaactcgaggggcgagaggagaagatggcggttgctgtgcggcggagacccagggcggtcgggctgactggcagaggcgggcgcggcggcgcgcagacggaagcgacgacagcatggaaggctgccgagcctgactcgaggatcctgcgggacgtttgtcgacggggacagctggtacgaggtcgtgcgagactagagcgaccctcgtcccctctaaaggtcgttgctcgcgaggctctggaagctggtctcttggtgcgccaaacgacgggcctgaccctctcacgtgcgaatcaggcttggccaccagccatcaccgcctgaaggccgcccttccagcacgccccccctccagagcatactacctctctagccctcgtccgcgccttcagcacgacttagcagcatccgctcctagtcggtctatacctttcgagcgatggaggtcggcgagtcgctcttctcggcgtccgaacgccacgcgctcgactcattcctctctggcatcgagggcggcgacgcactcgaccatccctactcgtcgcccgccagccaggcatcgaatagcatcacgcgggcccagcttgacgggaccggccatggcttctgggctcaaggcgggccgcaagctggcccgagtcggagagcggcgggcactcgcccgcccgaggttcgtcatcctcctttcgtgcttgaaggcggctactgacggaggaccctcttctcctcgacagatcgacttcccgcacccgtatccgagctacctgagccctggcatgccgcctgccgctccaggctcgccgttctggccgccctccgcgcgacctacgtcggcgggaggcttcccgcctgcgggcgctgcggccgcacgcgacggcccggccatctggcggccgccgtcgccgcccggcgtgacacatccctcctcgtcctgcgcctacgccgagcaggcaacatcggccaagcgtcggaggaccgacagcggcgtccagagtgagacgggcggagggaaggccaagggatgcgacggcatgcatgcggacggacctttcgcggcggcatcaggcggccagcgtcacgcgcttcacccgaacccactttacgccggcccggcgttcccgctattatcttctctcggctcgtccgagccacatcctccgccgactcacccggcggcggcagcgacagggtcacgcgctggagccgcggcgcaggtgccttcctccaaccggcgcgtctcgacagcaagctcaacgacctctcgcgcaggctcgggtccagggccagccaagcggctcaagaagccgacggcatccgctgcgatggcatctcctgcggcatcgacctcgagcgcaccggcgccgctgctgacggctgcgcagaagaaggcgaaccacattgcctctgagcagaagcggcgggcgaacatcaagcgcgggcacgaccagctctgcgagatcgtccctgccctccgaaatgcgattgctgaggccgagcgtaaggagcgggagggccttgcggctggctccggtgccgctcgggccaagaagaagggcaagcgcaagaaggggaagaagggcgacgacggcggcgaggagaaggttgacgggcgggccgggccaaagtctgagggcacggtgctgcttcgaagcgagtcctgtttgctttgcccgacgccgaggctattgtcgctgatgactcctcccgacccgctcgcagccatcgagcacatccgcgcgcttcaaggcgagcgactagcgttgctcgcccgcctttcggcggcccgtcgagccgctcaggcgcgcttcaacccggcggaccatgaggctctcaggatcgccgatggccagacgatcgctgaggaggacgactggggcggcgacattgcctcgggcagcgaggacgacggctgaaggccgcgctagcgcagactagactgtagtgagtggggttactcctgcagcgatcatctttatgctcctttttacgacctctttatgacctgtttgtttgaaagtttgacgctcgtcgggcaagggagcgagggcaggatgtcgtgacggttgcctagtgaggccggggcaggggtaccacggctcgccagcccgggtctgaacggagggttgaaatacagctctcactcgagccaggcaagtgtctagcaggtcgtgctgtggagcgaagcaacatcttcacgtacaaatggggaccggtctacaacaggcagcaaaaaagggacagcctgaaccgccaaaaaacatggagatactgggaatcgaacccaggctaatcactgatcgaatgttgtatgcgaagcaattgtcgtaaccacttgactatatcccccatacagtttgagctgctcgatgaagaccaagcgaaaacaaagtatatatacagcatttccagatgccaagagcagcgcgtgcccagaggttgggccccggccagcgcttatgccgatggtgagcagcatgtctcgctcggcagacgagcgttgacctcgagcgagttggaagtgagagctgcgtgtcggcctgcgagtgaaggccgttgacggtgcactgctagacaaagtggtcgatccggggcacactgcgaggcggaaagctatctctcatgaatgcaatttgaatcaccttacactgatctctaggcgcatgaacgaaacacctgaatgatcaaagcgatcgctcctaacttcttggctaagttcggaagatggaaattgagagacttgctcgtgcgagggtcagaagtggaccgatgtcggttggaggttgggagctgcggccgccgccttcgctgttctcgccccgaccccttactccgcccgtcacccgtcgagctccctcccacgcatttctagagaatttgcccgcatctgagggaggtggagttgtagagagagtagagaccaacaggcgcgacctcgtgtaagtactatgtgctttgtccagcccgctctgctgcctgcgcctcgcgccgccctttctcgcctgcctttgctctcctgacactgcagacaggccgctctggctatgtacataccggctgtcagcgagctgtcctatgcatgacatagtctaagacccatcttccggtgcccgagtcctttagcctaatcgttggcgaacatcggccgcctccagctgcgcgtgacgacgacgactctttcgactccggccctctgacttacccctcatccgccatcagctcctactccgcttctcacaacctacccccacctcacctttcagcccacttgctttctctgcctcttcatctcatagacgctcagcatggccaccatcaaggcttcacccttcaagcttgcactagtccagctcggccaggtcggcaaggataagacgcgcaacctcgcccacgctcgcgagatggtcctcaaggccgccgagggcgccgagggacagggcaaggtcgacgtcgtcgtgcttcctgtgagtcgcaccgggacttgttgctcaaaggaaggggggagggacttgctgccgctaccgcttgttcgcgagccagagcctcaacatcgaaggctgctcagtcgaagccggccggccggccgcgaactgagattcggggttccaagctcaggcccagccaatgctgtcctcgggaagaggaggatcggctgtcatagctgcctggctcagtgccagacacagtgacggacgagacgacggcaacagaggcttcatcgcatccgcagcgcagctcgctgacgccgacgaccgccccaggaggtcttcaactcgccctacgcagtctcgtccttccggacgtacgccgagtcaatcccgagcatcgatgccttcgggacggcgacgctgagcgagtcgatttcgatgatgtcggccgtcgccaaggaggccggcgtctggctcgtcggaggtgcgtctggccggcattcgaccgccgtccactttacgtctcaccatgctgattgaccctcgcaggctcaatcccggagctcgaggagacgaccgactcaatcttcaatacgtgcaccgtctacaatccgtcgggcgagctcgtcgccgttcaccgcaaggtccacctgtttgacatcgacatccctggcggcatcaccttcaaggaatcggactcgctgacgggcggcaagtcgctcaacagctttgagacgcgtgcgtgcagagaggcgcgctcttggcccgtccgtcgcctaacattgcttccatgcatgcagctttcggcaggtttggtctcggcatctgctacgacatgcgcttccccgagatcgcgatgcggtgaggcgcaagctggctgtctttccaaacgacgtctgtctgactctcctctactcgcctcttgcagcgccgcccggcaaggctgtgtcgccatgatctatccgggcgccttcaacacgacgaccggtccgctccactgggagcttctggctcgggcccgtgcggtcgacaatcagatctttgtcgccgtctgcagcccggcccggtcgtctgaccctgagtcttaccaggctgtgcgtcgcgcccccgctcagctgtcgacccgtagcgaacgtgagcagatgggctgaccctccgttttcgccccttccggcagtggggccactcgtcgctcgtctcgccgatgggcgaggtctactcaacgaccgacgagagcgagtcaatcgtctttggcgaggtcgacccggccgcgctcgcaaaggcccgggccggcatccccgtcaccatccagcggcggttcgacgtctacccggatgtcagccaggaatagatggtcgcgtctcctgcttgcagctcttgtgttcaggggactcgctgcagatgtgtcaagacataaatccatggaggacggggcagagatacacgaggacagacgtggcagacaggagacagaccgaagaaacaagacagcgagacgaggagagagatataagtgggtcgtgtgtcgatgatcgaggcgcggtgatatgagaggctgttaaagggggcgggtcgcagaccggcaagacaagatgagaggctatcggaagagaaggctatagggacaggaaggaaagagtccgtggaggcaagtgcagcaaagctagcgatcgagcgctttcagagcgccatgccagcataggcatcgtcgtcgtcgtcgtcggcctcaatctccgggatcggcagcggccttgtcggcgtcggcggcggcatcggcggcgtctttgcgagcaggtcgccgctcgtcgagctcgcaaaagcccaccggaccggcagggccgtctcggtcacgcaggcaaactcgacctctccttcgtcgtcgtcgtcgccaaagtccgaggcgcaggccgacgaggacgaggtcgtcgtcgtgcttgcgatcgagcgcttgccggaggctgcacgcgagacgaggttggaccggacggacgagagggacgagatggtcgacgagcgcgaggtggcggccgagaaggagccggacggaccggctagccggtaagcgaggccgtgcgactcgtcgtcgtcctcgtcgtcagaaggcgaggccgggcggctgttggcgaggaggtcggccaggtcatcggtcgtctcgccgcgagggaggtagcagtcggacggcgagccctggctcgacgactcctgaacggcggcgagcgcgccggccgtcaaaggtggcgtcaagggcgcgacggtggggccgctgctcgccggcgatgcccgaggggtgaaggagagagccggcgtcgaggcgctcgcgaggtagaacggccgccggtggtcgcggacgagaggggccgtcgtcgacgcagaggccgaggcgactgaagcggagcggccgtgctgcgattcatgctcggccgccgcctgccgccgccggaggagaatagacgaggcggggtcgagcgtcaggccgagacccaggcccgagagcacagggaccgagtgcgagtgaccgtggttggccgacgccgacggcccaggggttgccgaggccgccgcaactgggggtgcagggaattgctcgagcgaggcagcgccgagcccgggcgaaggtgtagcggagccggccgagactgcgggcgagcggagtgagctgtttggctgggttgccggagcgacgagagatacctctgccgactcgaccagaacggaggccgaggagaggctgtcgaccgaaagagaggcgatcatgcgtgcgagctcgctgtccagctccgacccatccccgacggcccgggcgctgaagtcggagccggcgctgtccctgcggttgtcctcgttcagaagcacaggagcggcgatcggctcgggcgagtcgatcagcgcgacgacggcgagcttcggcgtcacctgctcgtcctcgtcggaagcagcttcgatcgcctgctcgggctgaagcgcacgcgtcgcggccgctgaagacgagagaatggccgaaagcgagtcgtctgacccaaagcggagcgacgcgccaaagtcgaagccaaagtcaagcgcgatcggcgcctgctggtgggcatcggcgtcgtcggctagaccagtcgtcgggaagctgtcctcgagtgaaagctcgaggacgtcgtcttccaggctgtggaggtcggactcttgctcgtcaacagtatcgtccgtgtcggacgatgaggacgagccagcaaggtcgggcgtcgcggggatgacccagacctcgggcagcgagtcggccggatgagcggcagcagcgagcgccgcgggtgacggccaggttggcatcggcggcaggggcgacgacgaccggccgtgcttgtccgaaccgtcgtgcaggcgctcgagcgtccggaacgaggcgagctgcggctggacgaaagagggaaagccggacctgcaagacaaggcgactgtcagctccaaccgctcgagcacgaagcgtcgtaaggcaaggtaacgcacatgagactctcgtgctgcggctgcggctgctgcggcctaggcgagttgctgatcggagggcttgatgacgccacgggcggggtcgagcggaccgagccggcccgactcgacgtgcgaacggcaggggcggccggccttgacgacctcatcggcggcagctgcgcccgtgtcgccagctgcggcggcgacgacgagatgggcgagccgaacgacccccgactgccggcactgccgccaaagagggtcgtcgccggccggacgtctgaagggaggtactcaaacgaggcgtcgtcgcgcgcagtcgtcggatagggcgtcgcactcggcccggcgagcggagagctcgtcatcaaaggaatgttggacatgctgcacacgtagacagacgaacgagatggtcgtcagcgacgttcgaacccagactgcgtcgagcgcgcgagaacggacctgtttgaccgcttgcggccgtgtccaaagcgtctaccgcttgccgccggcaccgagcccgatgcgacgggcaatgaaggaggctcgaccctcgcccaagcagggagcgtcgactttgggctgccgctccgcgcgccaccccccgtgccgccgccgccggtccggcgcgtgctgacgaccgcgcttccatcgctcgcgcggcggacctgctcgccaaactcgctggccgtcggcgtcgacggcgcggtcgacgtcggtccgagtgggaaggtgggccgccgaggggatggcgggaggtccgagacgagcgagcggaacgttgcgctggcgaggaggtcggccgggaagacggcgcctgaccggcggttggagagcgattcggacgacgacgacttgcggcgcggcgtcgggggaggtggtgtgggatctgaagccgacgaggaggatgaggaggaggacgaggacgaggcggcggctggcgttgggggcgggctcggagcccccccccttaaccctaaaagaacgtcgccatggatacggttaacgttcagctgcgcgtcggccttgctccgctaaggctgctcttctctcctcttccactctcgcaatcttgcgcgagacaccgtggatggaagtccaccttggtgtagctcgctgaccgacgagctcaagaccgtgaaccattgaagggtgaggacgaggaagagaacgggtctatgacacgcgccgagccgttcagcatctgtcccgcttcaacgggcctgcgtttgctgctccctacatatctcatgtcggacgagccttagatgacaagcagcggtgtagtctcagcctcgatgaaggtcagggcgttccagcagattgcgggcgcctgaggttaaccgatagacaggggaggtgatattggcggccagagctcgtcgcccgccctaatacctgaccaccatctcgcccgccctcgcgacgccgcaacaccagtcggcctgaccagcagccgaccctactgcctctcagatctgacagtcgtgctgctcgacaggaaccggccagcttcgtaagcagcttgtcgggcgaccaccagctcgcagccgacgccccctgacgctggacccttgcaggctcttgatcgagccatgtctcttccctaacagatcaggtcgatgacttgaccgcacaagacgctgggctaaccgagctgaaaagccctggtgcgcttgcttcgcgggaatccttcagcagctgccccgccttcagctgacccttcatccgcaccccctccgttcaaacccttggtccagccggccctgcagttgttcgctccttctcgagtgcgtctcttccttcggctgtcccaggctttccccagtccggattgtcggcgacaatagccgcgacgtaggccgggtccagggaatggacgagccctgccgacctcggctcctctcgctcaactcctgctgacccttgtcttattgcctgtcattagccaattgcgctttggcttccaacagaagtcgctcggcctcctctcgccacgtccatgaacaccattagagatgatggcccgcgcggttcgttctccctaataattcgaggagtgcggccgcccccgctcaccgttggcccccttccgtgagctcacgttgcaacccgctcctccgtcctctgcaggcgattcctacaaatgctggactccgagccgcttgcgctcgctcgccaaggtgcgcttgacgttcggcgcttgctcctccttctcaagccgacagctgatcggccttgactgcttgcctgctgtgtgacgcgctcagattccttctctgcagctcgcatcgtcatcactggcgtcatgcccccgctgtgcttgcacactcaagctctccctgctcggcaggcgctctcatcaactagcctcaaacttcgctcgccgacctggatcgaggtgcttgcgactgcatctcgtgctcatctgacccaagctcagcactcattcaaccgccctcctcgttctcgtcaccaacttggcatcagctcacccgctgtcgcggaacaatgatctgcacgtgcgtctccgtccccgcacatctctcctgcttcctgcatccgctcgatctgaaagcgctgactatcttctgccttggttcatccaggctcaaagcggtttacagcacgcgtccctgctcgagacacatgccgtcgttcgcctgttaacaactcgcctcgggcaagtgcaaggcaggctgacgccgctgctccctttcgtgcgtgccgctcgcagaccggctaggcgatgttcctcctgacccggttggtctgtccgttctgcctcctcctacaaactctcctcgtctctggccatcctcatcttcatcttgctcgcccactctcccatcgaccgacgacgcaaaggtcggccgccgcgcgcttcaacgtgcgacttgtgcatttcccttcgtcaatcgctgtccttctctcggccgttgcgttcgagaaggaattccctgttgctctcggacagacggtgagtccccgacgaaggcagcctcccagcttgctggctcaccttcgacggcgaggctgaccttgtctccgttacatcttcccgttcggcatccaggcatccttgtcaatcgccactctctctcgactcacgcaaccgcctcgcccgcgctcgctcggcattgtcggttgcgttgcatcgtctgcgcctcggctgcgactcgtcttgccatcctcctcgccacctcgctgccgacctcaccgctgtcgcctctcgcacgcgtcgccagtcggtttcccactcgcctttactcgggacaggccgacctgcactgacgctcaacgttgatctgtctcgacgccgaaaagttcagcgctgctcataccctgcacggctgtctcagcatgctctgcatgaatcactcccctactctcctttgaccatgccgccgtgcaaggccgtccttagtggcttccgcgagcgaaccggcatgaagcggttgaagccgggttgaaccggccatgaatttcgccagcgcagccgagcgggcccctccctcgcccggcgcgccgagccttcagcccaacgccttgagcagcctgttctcgccccaccaacgacctctccctcctcccgcccaccttcctcccttcccttctccttccctccctctcctctcccatcatggtcgctgtcaaatcgaccgagaagatcgaggtcgtcgacgagatgaccgccgagacgactgggttcgtcgtccctggtgcgtgctccttcgccttggttccttccccccttgatcccgccctctcttgattcgccttcgctaccaatggtaccaatttctgaccctgaccttgacctctcgtaacctctaggcttcaccatcaagcagctgcttgacgctatcccgtgcgtcgctcgttgcacttggctctgcttgcgaggcggtgctactccggctccttccgatcgccactttgcatcgggatcgcaagactgatcggggttctcttcacttctgttcttcttcagggccgagtgctacgagcggtctgccctccacgcgtcgcggtacatgtacgtcgtcttgcgcggttgctgtttgcctacgagctcgagagatctgtcgctgaccttcagctcctgccccactccttccttccttgtttgtctgcctcagtgtccaggatgcgtgcctccttgccctcttcggctacgcgtcgaccttcttcccgaccattatcgaggcagcgttcgtcctgcgtgctcggcaaaccagcccctgccttgtcttctccaactgacacgccgcctgtcgttgcttccggctcttttccgcagtggcctgtctggatggtctgccaaggctctcaactttgccctctggaactcgtacttcttctggcaggggtgcgttttcatcgtgctgtagcagctcaattgcgcccctgacctgtcctcctgctgtccgtccgcctcgcaagatgcgtctttgtcggcttctggatcatcgcccacgagtgcggccaccaggccttctcgccgtccaagaccatcaacaactctgtcggctgggtcctgcattcggccgtcggagtcccttaccaggcctggaagatctcgcacggccggcaccacgctggctgcggccacattgcccgcgacgaggtctacgtcccgcgcacgcgcgagcagctcgtacgttgcaagagctgccttacgctgccagtgcccgcctgctgacgagcttgcttgtcactttgcagggttaccccgccttcgacgagaccaaggaggaccgcgccggcgtcaacgtcacctctgcccgtcgtgctgagctcggcgaggccatcggtgacgcccctctctacattctcggcgacctcatggtccagcagctgtttggctggcaggcgtaccttatcaagaacgcgtccggccagcgccagtaccccaagggcaccaaccactttaacccggacgccgtcatctttgacaagcgtcaccggtcgcagatcatcatgtccaacatcgggatcggactcctccttaccgggctcgcgattgcgacctacttcttcggactcaagaacgttgcctgccactgtgcgtttccctgctgctggtcttggcgcgtcgtccggcctggctgacctaggtttgtggtctacatagacctcgggccgtacatctggatgaaccacttcctcgtcggcatcaccttccttcagcacaccgaccccctcgtcccccactactcgtgcgtccctctgcctcgctctcgatttgcattcgagctaatcctcgctcgtccacctcgcaggaacgacacctggacgtttgccaagggcgccctcgcgaccatcgaccgcaactcgctcgggttcattggcccctacatgtggcacggcattgtacgtgtcgcctcctttctcagcattgtcctttcctggctgaccgcttcgtcccaccttcctccgcagaccgagacccacgtcgcgcaccacgtctcgtccaagatcccgcaccagaacgcatggaaggcgaccgccgctctcaaggaattcctcggggaacactatcagtacagagattcgtcgttcatgctcgatctctaccgcaacgtgatttgcctttcctcaattggccctttcttgacgtggcagtctccgctgacgcttccctccttttttcgaaagttccgcgactgcgcctttgtcgaccacggcagcgacctcttcttttacaagaaccgccaaggagtcgccaagatgacggctgccgtcgactcacctgtcagcgactcgggcatcgatgccggcaacctcgccgacgagaaggccaagtagatttcgtcgccgtcgctctcgctcagttctgctttcattcatccgttctcagtcatttctcgcaatcacgcacctcactctcttttttgggctcgttctctcctccgtacaatgtggcagcgcgccaccagccgtccatagaaacgtcgcgcctcgctctctcttttgtacgcccatcgcgtggtcgatccatgcgcctctctatcgacagcaggcggcccacgtgaaagcattccagatgtggcaaagtgcgggtattgagggcgtcgtgaatgtgaagagagaggtcgagaaagtgtccacagaatgaagaagtggtgagagcaacattggcgagggcgtgagagaggcgtaaggaagaaacgaaagatgaagggcaaggcaagactactcgcccttaaggcgagccttcccgcccttgtcggctttgtgacggatgtgctcggcgttgccggtctcgtcggctggatcgggcgggtggacgtcctcggaccggaggccatgcggccggagcgacttgtcggcgccgggcatgacgctcaagaggaaacggaggaaacggtcgccgtactcggccggcgggatagccgagatggcgtgccggtcgtccgtcaagctcttccacatgtgctcgacccgcttcttggtcgagtagcgcgtgcaaatgtcgatgacgccaaggtagtagatctcatcgagcggccggtttgcgtcatcggttgcgcgcaagcctccctcatcgcgatagaagaggatgcgctgccgttcgcccgagctctcgtcgtgcgagaggacgtcggtgggctctgtagacgttgctggctcggaccgctgcatcgacttgcgaagcgcgatggcctcgaccgggttcttgacagaggaaggtcgccggcggatcggtccaggcgaggccagggagtccggctgtcgcaggagaacaggcaacgatcagtcagccgcagcgacggagcgaatggcggggcgagactaacctcggctgaaggcgcggcagcatccttctgagcgccctcgccgctgacgcggtggatgccgatgagcagcgagtggtccatgatatgcgcgttcttgagaaactcggcgtcgcggcggagctgctcagcgaggagtgcagctttctctggcccgagctggagtatccggttgcggcggacccagttgatgtccttcaggacggcgccaggcttctcgcgcgccttgtcctcggggtactcgcgtccgaccgacgagcccttgaggtcgaacgtctcgtggatgtcgcggtgcggtgggaagaggttgttctggtgcaagggagcaggaaggtcagtcggagcctgtctgaactcagcgcgaaggcaggcggcgcaccatgatcacaaagtggatcttgcgccctcgtggcagcttgacgcgatgcaggccgtagaagcgcgaaagcagcgtgtgcgggttgctcttgacgtgagcgtgataggcgggtaggatcgagcggaggaagcggtgctcggcgtggctgatcgtcttgatgatgaacttgaagtcgcgcgaaaagtaaaagaaagagcccgactttcccggcgagccgagctcagagaggatgtacttggccgtcagcgagagcaggtagtcggctgcgtcgaggtggaagtagttctgcgatgaagcgggaaacagggctgcgtcaggtcctggcgcaacgtcgagctcaagctgtcgacgcacgtctcggaggtcacggaagacccagggcgcgtagtctttgaatttgaagtcgtacttggccgagggtgttagctcgttgccgacactgccatgacgagagagaataaatgaggacggttgtcagcgaaaaattcgatacaaagcaacacggcccgacgcacatgtcaaacgagaacttatgccgcgccttgaagtcgtcgtcggtcagtgagcggctgatcttggcctgcgtgcgggagacctgagtgcgagcgggaggcagctcagcaaagcgcagccaggagcggtaacagaccaccagcgcattcgactcacggcgatccgaatgccggtgagcatgtcgtacatcagaatgtaattgctgtgaccctcgtcgacccaattcccagcgaggaccttcgtttgagggtcctgccgacgctgagtcaggttcatcgagccgagtcgcgagcgtgccgttgctggccccgggccgccgaggtcgcccccgagcctcgtcggatcgactgaagggccgccgatgtcgagcggtgcgctctggccagccgacacgaggtcgtcgtggctctgcgccttcttgctccggcgtgagatccgtcgccgacgaaccgcctcggcgttcgacaggatgtcggtgtcgagccggacgccgtcgatgccagggacagaaatcgagtgcgcgctcggtgagccatcgattgcagcggccagcggagatgaaatggagacgggcgagccggtcgtatgccggcgcgtgaaagctggcgctggaccgaggaagccttgcggcgagccctcagaggcggtcggggaggtcgagagcgcgcgaggcgacgaaggcgagccatagacgccggcaaagtacgacgtatgcggcccgtcgcccgttgtgggcgtgagcgagcgcgagatgtgtgaccggtcggagacggcgcttggccggcggtcgtaaacggacgcggccgtcggcaggggcggcagcgtgtcgttgtcgtccggcgtctcagcgagcgaagccgtcggcgactcggcgagcggcgcatcttttaggaccttctcgtgctcggtggtcgggaacggttcgcagaagacgggcagggcgggtgccacgccaggagcggcgggctgaccgggctcgagcggaagcagcgcagcggcggcgcctgtggcaacgtcggcatccggctgggtaaggacgaccggagctgctgcggcgtctatgacgcgatcgtcctcggacaagtctagcgggtcgacctcgtcctcatcggacggcggcgggcttggaggggccgtgaaggacggagggatgacgggcaggactgccctccgaacccctgtcggcccggcaggcttgcgagcccgcggcttgactccgccggcgccgtcaacgacgacgacagcatccaggctggaggctgcagtctgtaaggtgaatgacggcttccgaggaagctcctgctcgagcgggtcgacagtctggtccggcttcaggggcagggcctctggggacggcggcgtaggcagctcgaccggcgacggcgggacgacggcgaccatggctgaagggagcggcgcggagggagggtctatcaccggtaacgagacgagagaggacggctatgtgggagtcagacagcagcaggtcgctgggcatgcgaggtggcggtcgggagggctgaaggcaggacgggcaagcagagcttggccgaccggccggcgtgttgacctcgccgagcgagcaaggccttcgtcaccgcgcgccagccatgcctttttcccgcagcaagcctcggccccagcgagtaccgtcgatcacggccttcaagatagagatgcgacatgaatgcagagagcagataggatgcgagtcgagagcagtgatgagagaggatggatgagatagagtctactggtccaagcaggcagtcggcgaggccgcgacgacgaccggctgacgtgagagtccgcagcagtctgggcgcgcagcgaggccgacgctgatccgttgcgggtgaacgatcgtcctcggccggccaaggaggtggtggagggagggctctaaaggcgccggtcctcgagcgtgaagagaggcgatgatgaagggatgacgagagagatgaaggaggggtggattcgaagccgatcagcaggtatcctgaaagagcatcgagcatgaggatcagtgccaaaatctttgaaggatgaagccagctagtcacaagaactgactatgagcctgttcttcgggagcggtgcgttgtcggtcatctggtcccacgtcgtgctgagggtcgaaggacgtgtcttttgtcagaagagggtctcaacggaacgccggcaaggttaggacgcacatgttggggttgttgtaggcatcgacgtagcgctcgatgtacttggccgttggcgcgtcgtccgggtcgcagccgatacggatgtcgttcgggtcttggtagacgcgaacctgtagagaagaggggggaggttagcaactggaacgccgagaggggggccgacgtgacgacgcacgtattcaacctccatcttcatcgggaacatcggctcgagaccctcgtctgcgagagagggttggaagagcagagatcagcttggaccctgagagaagtgagcagcaagaacggtcgcacagtcgatcgcgccaaagttctccgagatggcgaggttgaacactgcaacaaccgccagagagaggttcagcaggaccgcgcttccgcaagaaacgacctggcgcacgaaggagaaggacgcacggatatacatcggctcgtacgggatcggccggttgccgatctgggcggccgcgaccggtccgaggcctccgtcacggaaggtccacgagagctcgccgtctgtcgatgaggtagggcgggctcccgtcagcagctgtgaggcgggtagcaagcttggcatgaagcgcgcaccgttgaaccactagtgttgacaagatggccagggatcagctctcgaagcgtgcgacagcagagcagacagcgacgcaccttgatatagccgtcagggcccgtcttgtactcgaaggcctgagcgagaaaggcaggcctgtcagcgctgatcggtcaatacgacgggcggcagaggacgcacgtaggtcgcgaagcagccctcggcagcgccgtttgcagggtactggtagcagctagagaaggggccagcgcgcggccgtcagcacctctcgcggcacctgcctgagcgtcggaggcgcacttctggttggtgacgccgacgatcgaggtcgtcatctgggtcggtccgcccttgtaggtattgataaaggccttgtcgtcgtcctcaatcttcatgtaggtcgcattgtcccactcgtaataaggattgaacggcgcccactgcgccgagagcgagacctcgccctggccatgctggacttgcgcctcgatgacatcgatctccgaggccgaccggccgcggaacgagccgtcggtcatacgcgggcccgggtgcgtcttgtcatcgggacacgtgcatgccgataggcgctgacctgggaggtacgacagggcatagtcgctcgcctcggccaggcccgtcttggcattgacgagcggcaggccgttgagcgtctgattggcgagcgtgccgacgtcgcaagagtcgtacgagtagggccaagtgccctcgagcgtgccgccgtagccgacccggccgaggttacccattgtccagaaggcaggccagagtccggcgacggttggcgagcctggcaaacggatcctagcctcgagacggccgccctgggttgacacgataggggggggaggcaggggtcagagaagcagggacaagggtgagacgagtcagttggcgactgcgcacctggaaacactggtacaggacaacagagggagagacgacgtcgggcgaggggggatcagcgaatgtgcaaaggcgaggggcgaggcgagagtgacgaaggggcgaccgacgaatttattccacgactgaatcgaggagaagggtcagcaaagcaccgaggaggaggcctgtgggagtggggcgcacctggagcgaggcgccttcatattcgaggccatgactcggcatcttctcgagcgtctgaacgagccggccgttggccgtcgtagactgcctcggggagtaccattcgagctggcggcgcgacagggaccgcacacggtcagtcgggtgccgcatgggcggcctgcagtgagcaacgcacatcattcgtcgcccaggcatgcaagtctgtcgcttcgaaaaagccgtcgtcacctggccagaaggtcctgccttctgtctcgaactcgtcagaaaagacgagctcccaggtggtgccttcgtcggagacgatcgtgtgcgccgattggggcgtgtcctggtcgactgcgacggaacaaaggggtcagctccaggcgactggcgagtgtgcacaaagagggcggcgcactgagaccaaagttgccgataagctcgggcacctggccggatccgttcgtcccgccgagactgccacagaggagcgagattcgtcagcgtcggtaagcaccctacaagagcatgagaggcacgcacttgaaagcgccaagcgtcctcggctgtcgactcctcagttcctgaaggattggatagcccgcaaagagcataaacaggaggaggccgaggacgaggagcgtgcctaggttcatgaggccgcggaccgtcagaatcgaaccccgcgagtgggccgagagctttgggtcatgcagccagtcgtcgggctccgtctcggccgcgggagcgccgccggaagagcgctgaagaggattcgagaggtcccaggcggtgtagtcgaactgccggggggggggggcagggaaaggtgatcagtcacgccgagagacaccccaggccagggagcgcaccttctccgcaagctcactgcccgcatacgagctcgtccgactcgtcgaccgactgagcgctgccccgccggcagcggcattctgcgcccagccgccttcacggtcaaagacgctcctgccgccgatcgagccgctgaagctcggcgcgtagcctccgcgcgagccccagctcgagccctgatggctcggcgtgtagctcgcgtaagtcgcgcgctcgtcggcccgctcggccgccgtaccgccgccgccccgagcagcgtaggaagggtgttggctcgggttgaggccaaaggcgtgcgggccagggacgggcgtcgggtcgtcgtcctgatcggtcacgaacgaagggacgagcgacgaggtcgagccgagcggctgggcgggcggatacgagtggtagcccgccgatgctgacggtagcggcggtggactgttcgggagtaggatctggccgggcagaaaaggagggtgacaggcgcgtccaaaccgcggcgcaggaggcggcgacgggcagacaagcaggcaggtggacgcgatcgagcagtgaaggacagaataaaggcagcaagcgggtgtcagcaaggatctcgagtttacaatcctgacctgtcgagctcctgcaagtcgaagagggaagcagggcgaacctcgaccatgtcgtccctggggccctgctgcccgcgccgctgctgctgttgctgctgctgacgcatgccgagaccgacgagcgcgcccgtcgagtctgcgcccgagctggcgacgctgccctcggcgctcgtcaagctgtctgcatcgctcgcccgcctccggccgttggcgcgggagaaggcggcccagagcggggccgaggctgaggtaccgctgccactgccggtggagccgaggggcgcgtgaggagacggcctgactgggacgggtgcgtagagcgaggcgggtgaagcgggtggcgacggctgaggctggggctggtacatgcggcttgacgaggggggctgttgctcgagaaggtgtcgacgagacgattgctgcttgctgcggccgccgacgcgtcgtctccggtagagtgggcggccgttacgcgttacgcaccagtcacagggcgaatttcgttcgtgcagatacgaggaactgcgcggacggcctcgccctcctcgcctctgccctgtcacatcccgtccctcatacccacacccaacacacccaccgcgtacgctcaggtctctctctctcttcgtactctccctctccagcagcagcagtagcagcagtagcagcagcagacatgtcctccgaggccggtccctcccgcaccaccgccgctcgcccggccgtcggctcagccctcgccgccgctcctgcaccggctgctgccaccgacgccggcatggcgtccgacagcgactctgactcagacgacgacgacgagatggtcctcgatgacgctccgcctccgtccggtctcctcccgaccgcgcccgtcccgtcggcactcgacccaaccctgccggccttcacgcccctctcggcctcgcagctcgtcctcgaccgcaaggacgagttccggcgggtgacgatccccctccaccggatcacgcccctcaagaaggagtgggcccagatctacgcaccgctcgtcgagatggtccacctccaggtcagattcaacatgaagcgcaagtgtgtcgagctcaaggtgcgtcccactggcggcgggcgggcgaggcggcgggcgagcgagtatcgaagagcgacgagcgaagcctggatcccacagcccgacgtggacgtcgagttaaccctgctgccacacaccttgcagacgagcaaacacacgcaggacgtcggccagattcagaaggcagccgacttcatcaaggccttcgcgctcggcttcgaggtggccgtgcgtcctgatcgcctccgttgaccgtctgagagtcgcctcgctgacggcgctctcttccttcgctcaacaggacgccgtcgctctgctccggatggacgacctctacgtcgacacgttcgagatcaaggacgtcaagacgctccacggcgaccacttgtcgcgcgcgatcggttcgtctctcattcgacgtctgcgctcgccctctcccgaagcgctggctgacaccccttttgattcctttcatcctcccctcgcacgcatatccgccctcctccaggccgtatcgcaggccacgccggccgcacacgccacacgatcgagaacgcctcgcggacgcggatcgtcctcgccgagacgaaaatccacatcctcgggacggtccagtcgatcaaggtcgcgcgcgacgccgtcgtctcgctcatcctcggaagcccgccgggcaaggtctatgctggccttcggagcacgggcgcccgcatgaaagagcgcttttagaggccggcagagcttgctggatggagggagggatgggttcacgctggtcttccatggggatttctttctttcgattcctttcaaaggtcggcctcgctactgccgtcccaaagcgtactctcgctccggcgcagcgtgccgccgaatcgagagggagactgtccggaggtgcccggtcaaccttctcggcgtgtttcggccgcccttatcgacgacatcgaaagcctaccttacctctgctcgcttgcttgctcgcccatcgctcgtcagctgaggagcctttcaagaaagacagcccgctgtacgagtcgattcagaggggcatgagaagtacaacagtgagggtgtcacatcgagcgaggggagtggagaacggaatcggttgggagactggagcagagctgagaggaccgagaagaggcgtaatagactagagagccgaggaggaaaaagcctccagaagagagagagggggggggagcaagaagggagactggacttagagagagtgcggctcaagagacatagagcccggtgggagcaaagggcgggcgtggcacgcctccgacaggaagagtgatcttcttgttggtaagcgccgtcagggcctctgtagatgagcgagagttccaaggggtccagtcaggacgatcgaccaatagaggccagcacagacagagcgacgcactcggtccgccgcaacgggtcgttgggtcgccctgggagttgaccggcgagggctgcagtcagcgcgaacctagccaagtggaacaaatggagggacgggaggcagtgacgcacgaagcaggggttggtgcagagcgtactgagcttgtagacccttatctccgagctgaacgcacaccaacactcatcgcggctaagttgagggcaaaggaggcaagatcaggaagagtcagccgcatgtcgcctcggacaggaatgggcgagcagagtgaggcgcacttctcgattcccgcaacgtcgtagccgcgagttgaacagtgatcagcgcacatagcttgcgtaagatcgacaaagacttttttggcggtgaaaacgcgggtggagccgtcgacgagatcggcgacgcaataccccgagtaaacaaagttgtctgagcccttgaccggggcgaccgcatactggtcctggagcaccgggcagacattgtcgtggcattgctgcttgttgatgtcgatctggtcaggtgcgggcatggtaccgatgtcattccggttcttgacgaggatcgtgagggcctctataagtagcgagtcgcgtcgagcaggacgtcagtcgaaccggccggagaaagggcgagcaaggacgactgactgctgccgccgcaacgcaagctcttgtcaccgggacagtcgagagagcagctcttgctgaggtagtagctcctggccctgacatcgtctgaaggagcaagcaggcggagccagacagatcagtcctcagcgtcaagagagtcctcaatcggggtaggaagatgataccgactaactcgtccacaccagcaccttgatttcagcgaagtgtgtcagtcgctggctaacaacaggaatgtcgaagaggatgatgaggcggacgcactctttgccgctgggaaagggttgaacgagaaagacaaagattgtcagtggaggatcgagagctgcgcaccaatgagacgcacaattcaatccctgccaagtcgtagccacgtttgagcgactcgcagtgggtctcgcaggccttgtgatccatgttggcgatgaccttcttttgctcgaggaggcgaaggtctccgactgtactccggcgaggccgaagaaagcagggacgtcatcgacggatcagtgcgaaatagaagtaccagagagcggcgagaaatgcgtcttacctgaatctcgctggaggtgacggtgatgcaggaggaagggtaaaaggcgagggtacttagtgctggctgctttgcggccgtgaagggatgggtccataccagacagtagcctgaatcgcgccagccgtcgaggtgcttggaaggcggcggcggaggcggaggcggtggagcttccggaggataagtgcagcggccgtcagggcaaggggggatgcagccactggattggcagtaaacaaagtcggcgtcataggggctagcagggcgtccggggtactcgatcttggtgagcgccgttaagacgtctgccagccgaaggacgggtgacgcaaaattagcgaagtatttgttacgctggaagtgggacacatgaactgactgctgccgccgcaaaactcgcttgagccaggcgtgcagggcgcacagttgttggagagggagaagcccctgagctgaatctcagcaccgatcgcacacaagcatctttttggccggcagagtcagcatctgtagttgacaagtgggcagaggaacatagggacaaggcttactggttcccgctgcagacagcacaagcaaaagggcacgcgtgcacgtcagcgagccgtcttgaagggaagatgacaagctgagccgggcacgcaccctatgatcccggcgagatcgtacggtctgtccactgtggttgccaatacgcagtgatcaatgcagctagagtaagaggggctggagagagtcgtcctcgtgctcagaagctcgtgaatcctggctgatggcgaggaaggcgaacgagtggagcgtcagaaggtgcgtctcaggaatacccggctctaatcgagtagagggaagcagcagttgaccattgtcaatctagaggaggtaaaggcgtaggaagagctcgggtcagcacagatcagagtgagaggccaagagagaaggagaggatctgacaaggcagtacccctcatagtaccagccagtgttgccgatgggttctcgcttgtggacgtttggcatctcatggtggacggcggggtaggcgaggctcgtcgacgccagagcgaagacggggatgaggaggttggccagcatgctggcgagggcgttgggattgagggttgcagagatgttgtgaagactggggagggagacaatggggctgtggttacgggaacggttagccctgcctttataggcaaggaggactgtcatggagagagaggtcaggtgcagaagccgaaggaccacccgagcgagtaagagcagtcaggccatgcgatgccgctctcagtcgcacctgactagtcgttggccagctcgctgcgcagctcggaagacgtccgggacttgccatgcgtggaaagggaagtggggcgtcgttggttggtccgggtggcgtccgccttcacagagctgttctcgccggcgaggccgacgggccagggggcgttacccgcgagcttattcgcgggagccagacgagaagcgagcctcggccgacggacccgtgactaccgctcctggcaagcaagtcggagttgattggcgtttcgggcgggccagagcagcggaagctggtgctggttggcgagcaggaggagtggcgggcaagcgagcaggacccgttccgcctttggcggagcgcccgaccagttaggaagagcgctgcttcagcaagccggtgagcgcgagccggggtgctgtcaaagctgctgaacggtcagcgagtcgcagcctggacattctgagcgagatctggtcggaggggaagactgacagctgctgcgaggaggctgctgcgaaagtcgcgacggccctgccgccaaatgtcgacctcccgacctcggccacacactctccaagcccggcaaggcatccatccatccatgaccagcagaacggcggggataacagctctctgggcgtggattgcacggcgcccgctgacagtcaggcctctagccaagctgctcggcccgcggcgatgcccctgctcttctagcccggcaccacaggagacgccgtcgctcggtgtccggcagctgccggcctcactcggcttcatgaggggcactcgagccgagtctgcttgcccatccacgagtgcgatgggcgctcgggccgatcctgtggccggcggccagcctggagaacgagcggcggcggcgtcgcggggagctgaccttgttcggctctagccatctcctttgctgcttcctgtccttcaaaagtggcttgcttggcgttggcctagtcgagcagagcgggtcgcggctctttctctcgcgtgtcggtcgacaggaatgggtaggcggctgccttacggcgggctcgagggagcatagagcatccggcccgcgcctccgtcttcgatggcggggagcgatgggcggtcctgtcgtcgacgaaggccgccagctcttcgcggcaaagttccaatgagagccggcagcggtacagaatttcgatggccgctctctggcggccgaacgttagctcgacgggtcggggggggggggggggggggggggggggggggggggggtctccctcacttgtcgagacggcaactggcacatctctcatgtcactcattctttgaacatcgtagatcggcctttctgctcgacagcatgtcgctccgttgaaggaagtccgtcacgttgccaaggttgcgcgcgacgccgtcatctcgctcatcctcagaagcccgcagggcaaggtctatgctgtcctgcgaagcatgggcgcccgctaaggagcgcaacttgcaggccggcagggctcacacgtctctcatggcttctatctcttgggtgcgcttcgcctcgttctatccgttcgcgaccgccctccaggctgctgttgctttgctcacgtcgcacttacatcgcaccctctcagatgcgagccgtcttgcacttgagaacgatcatcatggtcctccatccgtgctgactcctacggcgaccatgtccatgatctctctcagcgcccgaaccttagccccgtcgacgacccagcgcccccactccctctccgttccctctccaagcccaaagcccattccctccctcctggcgggaggctcaaccggcccatcggtccatgcagagcacgaagcgtgcagctcggtgatgtcgcctcgctcaatcgcgcggcgtaacaccgacgtgccactgccagcaccgtcggcaaagaggagcgagggaagcgacctggcattgatgcccgacccaggcaggatggccggaaaaccgctgtgcgtgctcaaagtactagcgagtcgtgcgacccactcggccgccgggggaaaggtcggtctgaggccgctgcaagtggagaagacgacggcgagcgagcgagcgcggccttggtcagcgacgagatctagatgactttgacgtcagctgggaggcgcacctggtcaggactcggctgatgccgccgatgcgtctgagcgcgtccgtcgatctctcggctgagaagagggggatggggcgagtccgtcatcggcattggtgtcagctctgactgccctggccccacgtgcgttcaacggcagagggtctcttaccgagcagaagccacctttgcattggcggacggtcctcgaaccccaccatattgaccatgtcgaacgcccggtggaaggtcactggagcaggcttcagtgtcagcgactagcctttgagagggagtagatgcaaggttgggggctcgccttgggacggcctagctgccgcaattaggctgctcaaccgccagagcaagagtcgagtcagcaagacattcaacgtctcgaccgtctgtgaggcgaacctctgagttgcctcttcgtcgatccgccccttgggcgtcagacagccaaagacaaagccttcgacgggtgggtcgacgacgagcttcacgagctggatgtcgcccctcatcgcctcgagctcgtgtgtcgagtagacgaagtcgccgggtcgaggtcggatcatcacctgcagtcaaattcaagtaggttagcgagccggcagatctcagcttgggcgagggagcgagccggacgcaccatcagggggattgttggatgcgcccgccggatgagcttgacaagcgagatgctcggggtcagcccgcctccgaggctgagcgcgccgcagacctcgagcctgtccgcgccgttctcgatagccctgcggcattgacgagcgctcgagtcagaggtcgacaggagacgacaaagcaagctgggcgaccgcacgtctcggccgattcgaacgagtcgacgcagacctccagcaggagccgacggtaagctgcaccggctggcgacgaggacatgcaggacggttggttgagcctactggttcgtttggagctagttaagggatggcgtcgctgctactgagtgaaggacgatggcggtcggcaggaggctcgaccggtcgaatggaggggccggccgaagccgagggcacgcgcagcagggtcagcgccgctctgcttgacccggcagcagctacttgctctccccatccatgccgttgataagaccagtacggcccttaccaggtcgtctgcgccgagtcgaccgtcgaccaccggccaattcactcagcctgacaggagtagagaaggatgatctgcgtcgagggtccgcgtgccgagacagaagccaggcgggtaaaccggtgaagggaccatgcgcagagagccagggagaaaggcgagtacagccagagagagagagagggagagagaaaggagaaagagaacagattccaggaagcgagggggtacagcaagaggcagaagcggagacattgtgcaaaagcaggcacgagagagcggcaagagagcgctacatcgtacgtggagggagcgcggacgctcagtcgtagtaagggaaggccggaggttgaggagtctggggaggaaggatgactttggggcccgtcagggcggtgatagcgtctgttatgaacatcaggggagaaggtcagtttcggatgatgagacgcagagaagaaagaggtcgaaggcgcaccgtagccaccacaccgctgagtagggtcacccgggcaggggaagtcgcacttggtcgtgagccggaagtcgttgaagttcgtaaagaggctcgagctcgagcaccagacctcgttgccgctgcagcgtgaacggagcgacgctcgtcagcactgcgtcggccgccacgcgacggccaggtcggcgacgtactactcgataccggcgacgtcgtagttcttgccctcgataccggtgcagtattcgatcgcgagcttgtgcgtcacattaggaatgaccttgacgtccttgaagacgcggccgttgatgttatcccggacctgagaatttagcaaaaggcaaggtcagctcgacgtttttagaagcggatcgaccgccctctaccctgagccccctttgagctgaaaaaagtacttgcacaatagcctgagtagttccaatcgagccggcctttgacgggtgcgctcgtgtacttgtcctggaggacagggtcgaccttgcagccgacatccttcgggcagatgatggcgtccgggttgtaaggcggcgaggtctccggcgctccgtagttacgctcgccgaagacgagggcggtcagggcgttacctccgccgcacgtctgggaccgatcgccgaggcaagggacgttgcagtcgttggagaggctgtagccccgggcaatgatctcgttcgcaattccgcagtaacactgcatcaatcgaagtattcaaatgggtcagcaaggggcgtgcagagagggggaagaaggctgatggacacacctcgacaccgctgagaatcgcaggagaggagaagaggttgttagtgccggctctgaagcgcagcctcctcggacgaggcactcactactcgacgccggcgaggtcgtaacccttgttcaatccttggcagtgaaccgcacacttggcccaggtcaagccgtcggcggccgtgttgaagtccttccggtcagagaggaggcgcttgccgtccctgccgtcgcgcaggcagaagggcgtcaccgaccatccgggcgcgctcgagccgagaggggtctgctgcgcaggcgtcgttggtcccgtcggcggcggcgtcggaggttcgatcgagccgccgcccgtgctgggatgaacggccttgctggtcgtgaagatgacgagactgtccggtccgccgcagatctttgtcttgtcgcccgagcaaggcatgttgcctgatcgacgaggaggtcgatgagcggctgtcagcgtttggcaaacccgagtcgactcgaaggaggcactcacactcggtcgagaggggcaggtcagattggaggaccgagccgcagtagcactctgaggaacttcagatgcgagtcggggcgcagagtgagagcgtgagcgcggaagggaaaggcgagccgttaagaacgacgtactactcgacgccggcgaccgtgaagcccttgctgaagcagaaggcagaacacttctcgtacgtattgtcgctcacagagtagctggggccctttaggagccggccgggaatttccttgatgcacttgccgtcagtggcgaagccgtcgggcaggtcgctgatgggcgcgagcgcgtcgggcacgatggccgctggcggcgtcacgcagcctccaggcgggcaatagatttcctggtaagggcgggaaggaggaggtccgaagagctcgatggtgaccgctgagatggcgtctgttggtgagagggacgggcaggagggacaagaggcgggagggacgggcgtgagggtcagcaacaagaagctatcaagcgacaccagtcgacgtcagactgactggagcctctgcgaagagagacgagcaagcgctgcggtcagtggcctgcgccagcacagcttggaaggagagaggagagaaaagacgaacccgcagaaggtcgacggcttgcccgggcagggcgttgtgcaatcgtcagagatcgagaagcccttggcctgcacttcgcgcgcaacgtcgcaataacatcttgcagagtaaagagggcagttttagtaacaaagagcaagcggagagagggtaacggtcatgggggctcactccgcgccgctaggaacgataggtcgaacgggcggatcagcgattgttcccgaaaggcgggcaagcaagtagacgtactactcgacgccggccaggtcgtatccacggttcagctctagacatttggccgcgcaaagctcaagcgtcatcgcgtcgtcagtgatgtactctttgaggaggcgcttgccgccgactggcgaggaggggagcgaagagaaagggagggaggcaggcaacaggcgaccaggcaagagagatcggctgagggtcagcacagcctagctgagtacggagggcaggagcagcaacgcaccattgtcgacctggaggaagcaagggcgcagaaggagctctggtcagcaataagagaatcaaaggacaagagaggagcgtggacctgccaggcagtatccctcattgttaaactgcgaaacgggcgcatcgagagaggtggcccgcttggcaattgcagagtgggtcgggtaggcgaggcccgtcgacgccagggtgaggacggggatgaggagggtggccagcatgccagtgagggtgtagggatcgagtgggttgtgagatgatggagatgaaggtgatgagggaagagagctgctgccggcctcgctcggcctgcctttataggctgggagggcaggcggatgagacggtcaggtgtaggagggggctaaacgtcgagctcctgcttgcgcacctagctagtcttcgacctgcccggggggcgctcggtaccgtggagagcgcagaacgcctcgttcttgcctggatcaggggcgggaccttgcgtggagagccgaggatgatggaggtgagttggcggtgctcgccagccacttacaggtcggccgcggccaagacggtttgggtgcgtgcttctgcttgtgcgcgatgcacgacggggagccgaggccctttcctcaagctgcctgagttgcgggcagggcaagcgtggatgagcagaaggtccggggcagcggaggctggctgcggtctttcaagggtgcgagcatcggccgggcagggaaacgagcgagcaagcgacctcacaagcagatgggcggcgggaggctcgtcctcttcggccggccgggcaaagcgacagcgctggatttacaaccttcctggacgagccagcatcctccggggtcgactgtgagctgctgcatcagcgatctcttcgactaagacggctgccatgaggtcgagaggaaggaagaaggagggggggcgggtcgacgtcgatcgtgcccgagcgaaagctccgagaccgtggcgtttcatcctgcgggacgacgcctcccttcccagcatccatgagctcggatctcgcccaagtaggcgtcgtccctgcccggcggctgacggctgaccgggattcgtcccgagcggccgacactagcgctcagccgtcggactgagacagagccagctgggggcagcaccacctgccttcgccctctgcatgctgcccgacccgcggccgcccgaccctctccggctcgaccccaggcccttgccttctctggcgagggatggggaggtcgctagagccgacggaccgcttgcgaggcaagcaggcgacgatgtgctcgccgtctcgctatcctcggctcctcgctggccgcccttgctcagcctcagcactgcggtcgaactgccagtcggcgccgctcgcctgatctcacagccgctcgccagagatcccaggacgctcgctcgctttcccgagcagcagcagctgagagtagtcatcgggtatcgcgtcactcggatcctcgcagcatgagcttggtgcggccgaccgcaacgcgtgcagtcaagacggtcggccgccggcctacggaacctgtcatgcgaggccaatcaagctcctcgcccgccccatcgccagcgcgcagatcgatacgggatcgcgagacggtcacttaggagggcatacaatccgaggagaactgcagctaggcccgggctcgacgaccgacgtcagtcctgctcgtctagagtgtgtgttgcaagccgcgacgcgaaggcaagagacgctgcagaacgcgagcgatcgtggccattgcgcccgctggtaagtatcgctcgaggcgtctccgacaacgggcactgcacgatgcatgccttatgacctggtcaggaacggagcgaaagacgggctgcgtccgtcgcaacgacgcacccagctgaagaccgtaagccgcatttggtacatccggctcgaggtcgcgcaatcgacgaggtggaaaagatgacggcagccgggtcatgggcgacgtctcagcgggcctttccgacgcctagcgagggcaggacatgagaccggcagacgtcagttatgcgctcgctcggtcaagtcagcccgatgcgtacacggcgggacgcacctgacggcagtgattgggcgcgtaagctcgacgagccctcagccgtcgctagactcggacttccgacccagccacaagccaggcgagcggtagccgatcgaaaggaagacgtcgacgtccaaggcgagcaccggcactcaatccgaggctaatcggccggccgacgcacagcaacttgacgaccacggcgagggatgagccgccgcacggcagctcgcgccaggcgatccggcccatcgggccggcaggattgtcatctaactggatcaaggggttgccctgctcggagacctgcggggcagccggtcgtcagggaaggcgggcgagagaggcggagcggagggggacgcacgctggcacacagggagacggccgccatcgctggacgggggacttgcggccgacggcctcgacacaggcgatgtggatacggcccaagaatgacgagtcggccgccacttgatcgaccgcgagtgaatcgccccttggcgccggcctgggagagcggcatccgtcagcgtcagcagatgcgcgtcgcaacggagctggagtcgagcccgaccgacctcaagcgcctccatagcttcggttgtgacgtgagcgcatcgctggagcagcagctcagaccaagtcactgcgggtgttctgctggcgaaggggacgatgcaagaggaggacgggcgagatgagctcgcggagctggccgacgacgcgtcgaggagctgccgcccagcgagcttgacgaggaccgcactcgacacgatgcaatgctgcaagcaagaggagcgagaggcgagagggggtcagctcctgctctagctttagctaagtttggccctggcttgggccggggcagagattgggaggagctggtcgacagcgacggaccctgtccgaggtcgactaacagcgacagccgaggtcgaagcctacgctgagcagccggctgagaagccaacgaggcacttgatgtcgggctgagcaagagcaagttgaccttgcccacagctgtgcgggacgaaggctggaaaagcgggtcgaggtcgaggagtcgagggcctgccattcggctcgcagcgtcgctgcgctagacgacgtcagggcggatcggtcgcctcccctgcttgccgcttcagtatgcccgcgatctcgaatagagccgtcaggattctgcgctgaccttgtagcatgcatttgttccgggtcaggcgacgcgagctcaattcagcggcgctcaggcacagcggccccttcatcgccagttgcccgagtcgcggcggcggagccaggaggaggagagtcagggcagcaggctgatcagcctcgagagagtgagaagaagcaacaggcctcctccttgctcgagatgggagtgagatgggagcggcaaagagaagagggacccagacgagcaatggccttcggcagcccccccatctctcgccctcgctagaccgttgagcccgggcaggagcctagcgtcgccgacgaccgccgtgcatggtcgcatggccttgcacgctccttcatctaccgacatcggacgccgccaatccacgttgtcggatccccgagctctggggcgaggcgaacggtggctggctcctccagagagcgccgccatgaggagcaggaggagggcgtctgccgccggtcgcctcgacccaacgttaaggcgctcccgtcgcttcgctggtcatgcgtgtggccgaggtcgccgttgttagcccaaacgatcccaggggggcagataatcggagtcggaggtcaggaggagcaaggtcgagcgaacaagcaggaggccctcgcttcggccaagctgtgcccgccgcctcctgacgccgcctgccgtttcctgtcgtcgagagctcgcctgtcggcctcgtgacgaccagtagtatgctcaccgactctcgatcaggtccaattcggcacaaaagagcacgctagcccgggctgatcctctctgggttgctcatgcccatcgctgttgcgcagcgggaggggtggcgcaacctgctgctcagggcgaagcctcgacctctgctgctcgctcactccccgccctcccttagcatccgaacagccgggcggcgtccttctcgagcgccaagagctcgcaccgtgcacctatagaccgaaagggaggtcggcgagccccggttgacaaaggttcggagacttgttcggtcgccctgatgggcttggccttgcttgcttgctctccccgggcaggcaatcttcctccgctgcatacacgcccacgccggtgcgccccttcttgacgacgccacgcttaaacgccacattctcagactgtctccactaaagaggttgcccaagcagatgaggtcggcccggcatggcccaccggcgtccaagcccccgcttcgattcgatgctaaccccacgctgcggcgctgaccctaatcccttcgcaagccggtccgaacgcctcttccgccacaacttcttcgcaaaagcctccctccccgtgcttggtcttctcctacgtcgagggccaagacgaggcgtttccttttgcttgggcaggggggcggcctccgaacgtcgcccgacgtccgatttggcgtacgatccaaggcagcccttcgagatgggtccgcccctagctctgacgtcgggtcgggcttgcaaaggaggaaagctcatctgaccatatttcgaccacgtcgaagtcgggaccggggcggccgagatagggtataagaagggggcgaccaagaggcagagctgacaaccttctcactcgcccatcacacaccaccacccatccaacccagtctgacatcaacctcaccatgctcccagctctcctgttgcccctcgtcgcttttacgactacggccttcgccgtgccgaccagccaccctgtggagaagcgcaccaatcccatcaccaccaccaacggctacgtgtcgcccggcccctacggtctgtgcatcaaggactctgtgcacgaacgcgtcctcaacaaggcctacttcggcgaccatgagcatatgacgcacggcaagtgcagtgacttctgcttcgtacgtccctcccggaggagccgctcgtcctgcgctcaactgacaagccgagcttctctcacagaacaagggccacaacacctttggtgttgagttcggccaggaatgtttttgcggtaagagccatcatcttctcccctgtgcacccttgactgacgtcctttgagttcgctttgcaaccctacaggcgacaagtgggtgccctcggcgttggtccgtccgcttgagctcagtcgctgaccttccgcgtctttgccttctgatcaggcacgacgtcgagaacaaggagaaagcatacaactgcaagtcgcccgcgtctctggccatctgtcgacggacctgcactgacgtccatttccccctcacaggcgacattgagtgctcgggtgaccacacgcagaactgcgggtttgtcgagttgcgcttcttgctagccctgaacgagcggctgacgctcagcctacttcttgctcgcttcgctcagcggccactcagttcgttgcctatctctcctttgcctcgatgccctgcgcacgagactgactgtcaatctccggtgtcgctgcctcgcaggccctcctggtcttccacacagccctgcacccgcccaccccttacgtgccgcccgtggtccaccctgcccctcctcttcccgctcccggcacgacaattcacggcttcaagaccgacggcttgtgctacagggaccagcacccccggaccatccagggctacatgtttgtgagtactagtctctcggcagcgatgagctgatgcgcgcgctgacctctttcgaccgctctgtcttttcaattacaggctagcgactacatgacgccaacgctatgcgtcgaagcttgccgagacaaaggctacaacactgccggcgtcgagtatgggcggtgagtgtttccgcctacgcttcgctcaagtcactctcaagcttgctgtcctgacaccttgtttttcttcaccatcccttagcgagtgcttctgtcagccccaaacctcgatttctgcgccctcttcaagttgcttgacctgacacttgtccctgcctgtctctgcccaatctcccaggttcattcgacggtgagcatctttacctccgctttctcgccctcgcgaccgcgcttgctgaagaagcccctcttgcatccgctcccccacagaggtccctacgaatgccccactcaaccatgagggttgcgtcttcccttgtgcgggcgacaagacgaagaactgtggtggacattcggtaagtttgcccgcccccggccttgcacggcctccaaagctgaccacgaaatctcttcacaggctctcgtcgtctacgagcggcacgtgcccactccgaacggcccgaagcacgtcgagaaccacccaacgtggtacgacaccaaggtcaacacctctaccgactgctgccctctcggacgtcagctgatgcccactcgcctcgccatctctctctcgtcctacagaaatgcgttcgtccactcgaccacctttcagctcgtcgatcgtgactgaccggccgtgctctccctgatcctcctcctcacctcagttcaaggactcgcagcaccggcggctcctgaccgacctctgggccagcgacgacatgaaacattcggcctgcgtctcccactgcaaatcgaagggaaagaaccttgccggcctcgagtagttcgtccacttgcgctccccctctaatctgcaccagcgctgacgggctcacctccttcaactctgcctttactgcgcgcagcggtcgcgaggtgcgcactttctcgacactctacagtcctcttccgctccctactgacgtcctccttgaatcaaaaaaagtgctggtgcggagagaaattgcacgtcaagaacatgaacccggagaacgcgtacaactgcgacatgggctgctcgtccaacaacggcgagcggtgcggaggatcaggtaacgaccagcttctgccgctcaagcatcggacgcaagtatgctgactcctctgctgtcgctcgtcagacgccctcaccattctcaccgaaggcgcgaactggtaaacagcaaccgtcgcggagcaacgtccggccagcaaggcccctctgcccttcaagtccgccccccccccctcctccaaatccgaccgtccctccttctcttggaccgatcccgttctttccgcgtcttcctcgtctctctccgtccttgtatcatacccccgactcaggccacctctcgctccccttgacttccctcgctgatgttgtcctagctcaaacccacactgtctgacccctcttgtagcctagtcctgtaaatcaccctctatgtgtcccccatcaatggtctttagccggaaaccgctcggcgctcgaccgtcagtcgcctcggtaggcaacggccggcttgctgcgcggctgatcgtcagcctcctcctgccgactcgaagctggctgcctagcctctgcctgaacgacgaccacgactgaccctgtcctcgcaccgatgacctccgagacctcctccgcgtacgtgcccacggctagggaccggctctggctggcggtggtgcgtctctgctggcaccgaagtttcggctgcccaaggtatcgcaacgctgcctcaaaggcggctgacctgttctctgccgcttcgcatgacggtctctggtcccgagcaggcgacgcacgtcctccggtcaaagccgatgtactatacgacggctggcatgtcccagctacgtcttcgtaattgcgatccgagctactgacctccttcctgcgcccttcagagcacgtcgccgagctccgccagacctgcgccagccgacggctcccgtcgctcctcgagcaaggctgggcaaagctgctcccaatcgacgccgacatcttcgcgcttgatctgctgctggcggagtgcggcgggtctgcgggcgcgttgtatcgctttctcgacggcaacgggtggaggtctgagctcgcacagacacctggaatagagcacctcgctcccgcagcctcgctaatcctctcactcgctcagatcggccggcagacgtcagacggtcaaccgatcgaccgtcgcctgatccatcagacgctcttgccgctcgcttctctgttcggcaacccgttcctcgcccgcctggagacgcccggccgacgtcgacacctcaacacggcctgcgccgtcgtcaaggcggtcgtcgctctcgacagctcaacacgcacgcctgagctcgaaattgcttctggcctcatcgattcgctcctcgacggccttgttgctgccggcgagcgatcatcgacctcgcaggccgcatacgtccttctcggcgacctcgtccgagctgcgctcgctttgctcaatgtcacgacttcacgcccttcgatcgtctcgccgagcactgagcagccttcagccgacggtttcgtcagatggaccgccgcagcatcttccgcttttgacgagccttcgagacgttcggtgtcgaatagtgagtgtgctgcgcggttggcctcgaccctccgccgcttcccctctctcccgcttctcgcctctcgccgccatctgacatctgtggcctctccgttcatattttagtgcgcgggaatgcttctgcggatacaagtcagagtcacgctcctctttgggccagtcggttcgaggcactgacaggatgagcgtacccggtcgggtgccgcgcccacaccgccagacgcttcggctcccgcctcccggggcggggtcatgaccggcgaccagccctttgctggtccgctcgtctgcgggatcgccaggcgactcggacaaagcccgacagatggcctgaccgcgctgtccgaccacgcatggctcgtcctcctcgctcttcttcaggtcgccgctccgttccttccgcctcgcgtcttccgcacgccgacgatcgacgcaggcctcgaagacttctcgaccttcctcgcgagcgacgatgtagacgcctggcgagcggtcgatcggctggcgggtgcccggctgacagacggcgacgagcgagccggcgacgcccagcggcagctgctgggcgtgctcgaccgagtctgggtcctcgagggcagcctcacgatccgatgacaatccccacagccaggcagtttggaagggaggggcatgtcatcctcgcccatggcaggcacctcaggtccggctcaggttgatgtagtgcggactcgcgagctcgtacgaggcgacaaagatgcgcttctgctccttgatcatgaagctggcgatcacagaaatcaggtcagcgcgggaccagagtcgcaggcttaaaaatcagaggtaacggaccgcatgaagtcggagatatggtcgcggagaatattgaccgactcggcgtccatgctcgtctgggcgatgaagctcggcaggttgactgcggcggtttcagagtgagagtcggcagtcagcgccggatgtcacagagctaggccagccagggacggaccaaagagccgcaggaggtgctcggccccgtagatttcgccagcgacaaactcgccgccctcctttgctttgtcgccggcttgccactcgcgtcgcttctcgaggtattgctggcgctcgaagcgatacagcaggttggcgccgagcgccttgttaaagtagacgtaaaggccctcgaggacctcgtcgaggatcgcgagcgccttgggcgactcgcccgcgcgggcctttgcggacgaagcgacaaagccgaggacgtccgccttgtactcggccaggagcgtcttgacgtttggtgtcctcgggagggggacgagctggtgagagaagcggtcagcataaaagctctggcctaagtggcaagatggctgggaggagacgcacctgctggttcttggtgacgtactcccagtcgtcgacgagctggaccttgagcacgtctggtacgggaaacttgatctcgggccggcgcgcaaagtcgagctcctgcgaggcagccaaggatggtcagtctcttcgccgtctcgaggagctcaagcggcgaagctcacgctatcaccctcccgtgggcgcttccggccggcgttcgcccctccgccagccttcttcccgctcccgctcccactcccactcgcgagcgcattgccctggccggcgccgacgtccttcgcatccgccgccttggccgccgccgcgctttcgtcctttgccttcttggcctgcttgaagacctcgatcagctgcttctgcttggcgaggccggccgggtcgaacttgagcaggcgcgagggcgggacccagtcgtcccagctgcgcgtaagcgtcaagccagccattaaaggagggtgatcagctaaaggcggcctttatcaagcctgatggctgcagcgctgacaaccagagcgcatgccagtgccgggagagacaaggagacgcacgacgccttccagcccttgtagtggacgtagtagagcgtgccgctgagcttctccttgccaaagtcgcgcttctcgtggtcgaccttgaggacctgcggtgcggttcggagaaagcagcgagaggcaaaggtcagctgggggagcgacggcaagagagagttcgaatcgcatcgccagcgccgacgcgtgcgctcggacgcgaggcggggtcgggccgggagagagggcagttgcggaggagagacgcgccttggcctcgtagatgagcgggccgtggtagcaaaggacgcgctcgtcggtcgtaaacgtcggctggggcagaggcgacatgcggattgcagggtgtttgctagctgcttgagtcggagggtctcgagtatgggcgtgggggcgtcgtcgcgacgggccccgagagacgagcgacgcgaggcgcgaccaaggagagactgggctcgatgatgtagttcatctgagctcgactatgattcatcatgattttcaatcatgatccgtccaaattgggcgtcttctgccggcggccgattacgcggaagccgccgtcagccccagtcagcccttcgcctctcctcggttgccagcgtacactcaaccaccactcctccctcctcctcctccccgcctctcatccccagccatgtctgcccggcagctcaaaatcttctcgcaggccgacgtcctcgcgcatgactcgcgcaagtcgtgctggggtacgtctcccctttgccgcgacccaggcagctgcgggcgacaactggcctccacattctcccgatccgacgctgacaacactccttcctgcttcgccctcgtagtcacgtacaagaacaaggtctacgacgtttctcagttcctgcgcgatcaccctggtgcgctcctttccgatcaggactcttgtccagcagggccactcgcgcgcgcgagacaagcccgaaccaagagctgacttctgccgacttccgaccctgacaggcggtgacgacgtgatcatgccctacgccggcaaggatatcagcgaggtcatggccgaccctggagagcacgagcactccaagagcgcctacatgatgatggatgaggtcggtttttctcactctctcgccgggcggcaggcgtacgcgtcctctcgtgttgccaccgggcgcagcgcgctcagccgcccgtcgttcggccccgcgcgtccgaccaggccgcatcgaacgatccactgacccttgtctcccgccgccttcacttgcccagttcattgtcggccggatcgtgaatgccgagacgaccgtctctggcgactgggaggcgccggacgacttccacccggacgacaccgacgtcctggccgactttgagcgttgcgagtttctcgacctctcgcggccgctcctcccccagctctggcacgcaaagttctcaaaggccttttacctcgagcaggtccatcagccgcggcacgtctcgtactcggccaagctgtttccttggccggcgctcgaggccctcaccctgacgccgtggtacatcatcccgatcgtctggggacccatcaccttaaccttcacctacctctcgcttctccaattctcgccggcaacgagcgagacgacgttccggacgctcgcgagcggcgtcgcaaacggcatccttccgggcctctggacatcgagcgcgatgctcaagacgggcgccctctgggccgtcggcatgttcctctggaccctgctcgagtacggctttcaccgctgcctcttccacgtcgtgcgtccctccgactctcgacgggtatttgctgcgtgccagaagcgtccgtgggctgacgtgcgcccttttgcttgtctgcaggacgacaagcttcccgacgccaattggtcgatgctcctccacttcctcctccacggcgtccatcactacctgccgatggtgcgttcctcgctaccctcgcttcaatcttgtgcgccttttgcgaaaggaacgaacctgaccttggtctccttcaccctcgccttcccgcaggacggcatgcggctcgtcatgcccccgacgctcttcttcatcctccagctgccgttcaccaaccttgcccacatcctcttcccggctgcggtcgcaaacggcatcatctgtggcgcctttactgcctacatctgctacgactgcttccactacttgtgagttgcctcgctcgccttctgcaaccccatccttttacctgccctcctcctctcacttgccttcctgccctcttcctcacctatcagcccctcccttctcgctcctcctatcccctccctcctcgctcctcctatccccgcactcatgctcaagctgacccttccctttgcgtttgcctgcgtgcccagctttcatcacacgaagctgccggcctacttcgaagagatgaagaagtaccatctcgcccaccactacaacaactttgacctcggctacggagttacctccaagctttgggactgggtattttccactcaattggtcatgaacccaaaggagaaggcggcgatggggatgtgagctcgtaggatgagggtttggagtggctgggttggggattgcgagccgcgcgcgacggccgacttaatgatatcgtggcgcctatactacgtcatctacctgggcgcgctcgcagcaggatcaccaggagggactgcgttcagatcttagaagggcagttcggagaaggaggaccaggcgaggagggacgccagaggaggaggtcgcggccctgctgcgcgcacggcggcctccgccggcttcatcctccttctcctttgctcctggatgacgacttcgccgactggcagcaaagagcatcctgacagctagacggtccaggacgtcgagctcgacgtcaagctgctgcccggggccgactatccagctcaaagccggccgcggtcggcaagcccggtgcgtttcgcctcggctcgcctcgcccagggctcgcgacgatcgctgacgatccttgcctcctccttcatccgaccctcaaaacctcggcccacagacttcacaagggcagcgcgagatccgtacctcgtcggagacgacccatatgcttcaaactggtcattaggtatcgcggtcggccggaagcctggccctcgagcacccctctcctcctctcctctcgagctcgcgccggccgtcgtccgcgacttcctctttctggatggcagcagcaggcctgcctcagcaggcctgcctcagcagcagtagtccgtccttatcgagatcgatctttgccgtcgcccttcgtatccgcggccgcccgcccctccgtctttgacgaccagcttccgttagctcgcggcgctccgaccccacctgctcggccaggtcgatcccgggcgtgagctcgtcgcagagcacaagtctcagcgcaccagtgcacgagcatcggcccgctatggccggcgcttctttcgtcgctgtcccgcggtctgctggctagttgctcgcccagctcgaccgtcgccgcccaggggcccgcagctcggcgtctccctccaggtccgttctccgcctgagtgttcccctcgtcgatcaaagctggcaagcttgaaccgctcgactcagccccggccgcctcccaggtgagcgtccagaccagcgccccgcgcgctgcatcgcgcctccgtctcagctctctctgcgtcgagcgttcaactgtcgccttggccgccgctgcgtcagtcaacaccgcctcaagctttgccatcgcccccatctggtccggttctggccatctcgcttgcgatcgtcaagtgagtccagtcggctgctgctgcccaggcgcaagtctccgcccgcccgctttggcagcccatccaggtcctatcgttgactcgctcgcccctcgtcgacaactcggtcgccgcagcgtcaaccgccctgcatttacgtctctcagcagccgctctgctcggcccaccggcagcgcgctgttcagctttcgaccgggcaccagctgtcttgccggccgcttgacgcaggtcatcgaggcgctgcccaagaccttcgccgttggcagctacctcctcatataggcgacgaacctcgtaccggcgctccgatggtcgtgcggaaactgtgcaacctcagcggccgccagctcctgccctgcaatcagctgcgactccttcagtcggctcgctctcgactgcccagatcgcctcggtgaatcgtgcttcgacccccttgacttcctctagtctttttcctcagagtcggataccgactcgcgcatcctttctccggctcgattgttggccagccactcgccttttatcagcggcgtctcgctcgtctctgtcgccgctgttcgcgacactgtcaccttctcccgttgacgtcggctgatcggttatcctttgaccagctgacgtctcacggcatcgccgaccttaggctccgtagtgacactcgctcgacttgcgcacttgatcgacccaaggaagaagagggcggaagaggcgccagtcgtgctcgcgcgaccgcctaccgtcggcccttccttcaatcgacaacgaacggaaacgactcggtctctattgctaacaaaggcaaaagggcgctgtctgactctgcgtcgcatcctcctctgctttgacccggctcgcgccaagctgctccccgtcgacaggcgccctacctctttctccttgtaccatctcctccagatcgccttggtgtcagactcgctctgttccctgcctttccgcttacctatcgacgtgactcctcaagcggtctcgcacctgaccaggatgcgacagtcgccccgtcgttgatagccagccgcaagcagacgtgctgctatgaaacgccgctctcctcccttctctcgctatgctttcgcaaaagtaccatctcgtccaccattacaacaactttgacctcggctacggagttacctccaagctttgggactgggtattttccactcagttggtcatgaacccaaaggagaaggcggcgatggggatgtgagctcgtaggatgagggtttggagtggctgggttggggattgcgagccgcgacaaccgacccacgacagccgacccgcgacagccgacctaacgagatgggcgtctgacgaactccttcttcggcgcacacgccagacaggccagactgtctgtcgagctgaggccacacttggtcctcagtcgttcagggccacgggggattgagggtcaaggaggttcggagggacgaggatgagcaggttacttcatcaacgacccctttcgtacgcctccggacccgaggcacagctcgtactcccgcctgtcgacccctctgtttcctacccttctctgacctgcctattccctgtgtacctgtcgggattcggcagccgacctgtcgggtcgatggccggcagcaagtttgttgattgagtgagcgtcgtcatggagagcgaggggaagggcgacccggagtttttgcactttgccccgcgtttgccgctttgccccgcagcccgcgacgacctcagcccacttcgcctcgtctgcaccaagtccccaacgcgaaccaccagcagtagtagtagaggcagccctttcaagcagcccgtcctaccgtactcctcctaacccttccgcgcgcgccactatggccgccaagcgcatccagtccaagctcttcgccaagcagcaggccgggacgccgacgccggctgcgaccagcagcagcggcagcggcagccccgccgccgccggcagcagcagcaagcccgaaatgggcgagctcggcccgctccagcaggtccgcgactcgttctcggccgagtcgggcccaaacacgatccagaaggagggcacgtcgctcaaggtgcgcccttctcgttgtcggtgttctcgctcgacgaacgaacgagggcgagatgagctaggcgcgcgcgcccgaccgagcaagccgaaagctgacccggtcgtcgtcgttcctttagatcgacattcccaagccgccgaccgacctgcccggcactcagaagccgcgcgagaaggagcagtgcgtgcttgcttctcttccagggcgcgctcgtcgctcaacgcgggctggctccttcgctggcctggctggcctctcgtttgcggggctggcggcgggcgggcgtgtgtgcagagaggacccctccaatggcaactgactccgggccctctcccttgccctcgctctcgcctcgcaggttccccaagaagggctcggttccggaggacaagtgtcggtttccttcttgatctcacactgaccgtgccggtagcccgggctgacgtcgcttgcccgcccgttgaccgaccgccgtcagccgcgactgggacgccggccgagcagagccccgccccggggggcagcacggcccctccgacggccgataagaaggtccggctccgtcgcctccctgcctgctgacgatagaacgagtgacagaactgacgccttctgcctcgtcgctcgcccgctcagcagcagcccctccgcgagcggctccttaattcgctcggcaaccgctacacctcggtcgaggagtggcggctcgaccaggacgcaaagaaggcggcccactggaagcgctgggggccgtacctcgccgagcggcagtgggtacgtccgagccgtcactctgcctacgcgcggcgtcgcttttggtgaaggaatttgctgacctggtgccgcttgcttgcccgcccgcctgcccgcaggctaccgtccgggaggattactctgccgacggcgacgcctggcggcacttcccgcacgagcacgcccgctcgcgcgcctaccgctggggcgaggacggcatcggcggcatctcggacaaccacggccgcgtcaacttcgcgctcgcgctctggaatggcaaggacccttacctcaaggagcggctctttggcgtcacgggccaccagggtgcgtgccgtgcgcctcctgaatcaacagaccggtgctgatcttcgactcttgcgcctttggcaggcaaccacggcgaggacgtcaaggagctctactactacctcgactcgacgccgacccactcgtacatgaagttcctctacaagtacccccagggcgcctacccgtacgaggagctcgtccgcgagaatgccgagagggaccgcgaggtgctcgagtacgagatcctcgacggcgactcgtttgacgacggccgctattgggacgtctttgtcgaggttagtctgtttgtgagcgcttcgcgccgagcgacacgtcgctgacgcgtctctgtcgcaccttcgcagtacgccaaggacgaggacgacccggaggccgtctcgatccgcatcacggcctacaaccgcggcccggacccggccgacctgcacattatcccccagctttggttccgcaacacttggtcctggcctttggtcgagccggagcggccgcggctctcgcagccccaggacggcgtcatcaaggtcgagcaccaggagatggcgacgacccacctctactgcacgccctcgccggcgccagctgcgcccgcaggcggaggcgtcgtcctcgtcgatgggccgagcgttgtccccgagctgctcttcaccgagaacgacaccaactttgagcggctctacggcggaaagaataaggtgccgtttgtcaaggacgccttccacgaccacatcgtcaagtcgcaccggcctgcggaacccgaggacgtccccaacctctcggccctcagcatgaagtcgccgccgtccaagacgcccaaacttccgccctcctacaagcgggcagaggtcgacgccaacggtaacccgattgaggacgacgaggatctcgatcaccaggacggccctgagcagcggcctgagcctgcgccccggccgaccaacgcccgtggcggccggcagtttgtcaacccggagaagacgggcacgaaatctggcgcccattactcgttcaccgacgtcccggcccgcggcggctgcgtcgtcgtccggctcaagatgacgcctaagggcgtcgaggaggacgaggcgatcgaggacgaggaggtctttgacgacgccgtcgacgaccgccggaccgacgccgacgagttctacgcccgactagcgagcgggcccatcagtgaggacctccgcaacgtcatgcgccaggcgctcggcggcatgctctggtgcgtcccccgctcagactcgcccacttttgcgctgcccgctcaccttccatcgtcttcccttcgcccaggaccaagcagttctacatgttcatccagaaggagtggatcgagggagacccgggccagccgccgccgccgcccgagcgcaagtgggtgcgcaacagggagtggaagcacctccactgtgccgacattctctcgatgcccgacaagtgggagtacccctgggtcggtgagtgctcctctttccactctacagctccttgtcggcgcttttgctgaccgtcgtcatccttctcgcttgcagccgcttgggacaccgccttccactgcatcccgctcgcgatggtcgacccggcctttgccaagaagcagcttgacctcctcacgcgcgagtggtacatgaagcccgacggcgcccttcctgcctacgaatggaatttctcggacgtcaacccgccggtccacgcctgggcgacgttccggatcttcaagattgagcgcaagctctttggccgcgaggacctcgacttcctcgagcgcgtcttccaaaagctcctcatcaacttcacctggtgggtcaaccgcaaggactcaggcggcaacaacgtctttgagggcggcttccttggcctcgacaacattggccccttcaaccggtccgagcctctgccgaccggcggcaacctccgccaggccgacggcaccgcctggatggccttctactcgctcaacatgtgcgtccgcagccgcgcttcccggctcccgtgctcgactgaccccgcttcttgtctccaggctcaacatggcgctcgagctcgccaagcacaacccgacgtacgaggacattgcgtccaagttctttgagcacttcctcttcatctcggacgccatgacgtttgagggcccgctcgactcctcgctctcgctctggaatgaggaggacggcttctactacgacgccatctcgtggggtagcggccactcgcagcagatcccggttcactcgctcgtcggccttatcccgctctacgcgacgctcacgctcgagccggcgacgattaagcgcttccctggcttcaagaagcggatggactggttcctcgagaaccgcgtcgaaatgtcgcagcgcaacattgccaacatcaaggtccccggcaaggccgaccggcggctgctctcgctcgtcgacaaggaccggctcgtccggatcctcgagcgcatgctcgacgagaccgagttcctgtccgagtacggcatccgctcgctctcgctctaccacgaaaagaacccatgggaaatggacgtcaacggcgagaagttctgcatcggctactggccgggcgactccaagtcgggcatgtttggcggaaactcgaactggcgcggaccgatctggctcgccgttaacttcctggtgcgccggcgtcttgctgcttctgatctcgccggccaactgacgtccctttgccctcctgcagctcatcgagtcgctccagcgccagtaccaattctacggcgactccctcatggtcgagtgccccaagggctcaggcgactacatgaacctcagctgtgcgtcctgccgggctcggcgctctcgataccgccactgaccccctcgcttcatctttgactcgttgcagccgtcgccgaggagatccagcaccggctgatccatatctttgccaaggacgaggagggcaaccgcgcctacaacggcggcaaccagatgctcaaccacgacccccacttcaaggactacctccagttcttcgagttcttcaacggcaacgacggccgcggcctcggcgcctcgcaccagaccggatggtgagtccttgcgagcgggcgagcgggcggtcgggcgggcgcggcttgggcttgagaccggcgcgagcgcgagaccggcgcgagcgcgagaccggcgcgagcgaggctgggggctggagcgatcgaggctgacttttacgcgcgtgccgtctctcgcgacctttcttttctctcccgcacctcctctaggacgggcctcgtcgcctacatgatcatgcagtcgggcctctcgtgccgcgtccccaagacgcctcgcactcctcgctctacggctcagcacttcttcggcgaggatatcgccacgccgtcggaacgcggcgacgaatctgctggccccttctctgcctatgccgcctcagaggcgacgctcggcgacctctcgcccgacgccctctaaatgtctccgtctcttcaactgtagatttgatgctctctctcgccctcgacctcgcctgcctcaattagcaagcgtgtaggagcatgtatgagcaggcggagaccaaagaaagtgaggatgaagtaaggaggacaaacagacagcagggacatgcggctagaaggtggaaggtcggtcaggaggagagcaaagcgaggacgggcgagcagggtcgactagcggagaacgatgagaggtcatgggcggctgaagcgtgatcacaagaggttgagtgtgcctccaccttcaaggagccgtcggccggcctgaccgccaagcgcgacctccgtcgcaattttcgacaacttctcctcctcgtcccacgcccactcgaagtcgagcgtctccgtcttgatgtagctcgcgctcttcaccgtccggttcatgctgccggtcgccgtgggctaatagcggacgagggcgaacgagatgaacggtgcgccatgtagaaagcacttctcgagcgtcgctccttggattcgttcgcgccagtgcagtacaggcgggtcagccttccgaaaccgtcgcaacgaaaggagacgtgccgggtggccggccgcggtaacgagtcggctggcgacgccggcggcgcccatctctccgacgcctttgcccgaacagagacgacgctggtaggcaccctccgcccgcggccgcgatggcttcttgcccttggcctgcgaaggccgcttcttgcgctcggcggtcaccggcgcgctcgtggcgttttcctcgtccgagcgctcgtcctcaccgtcgtcctcctcgtcctccgacccaagggcgggtgacgacgcgcgctgcatgaccttgaacagggggcgccgaggcggttgcgattcgtcgtccgactcgtcgtccgtcgacggcttgcccttcagccgcttgccgagagacgcagaggtgccgctgagccgtccaagtcctcgtcggtcgccggcgctgagtgcgtaagggtgagcggggccgagacgagcggcgacaggtcaggagccgtggagggcggcgtgccagactcgtccttgcggatctcgccctcgtccgacatcgagagattcctccgagtcgaacatgttgaggacagccacgcgagtggcggctgcttcggcgccgccgaagacgttgtccgagtctgtgatcgtaatgtcgacaggctcggcccgagcgaggccgaggccgatacgctcggctttcgactgtttcgaggcgacggtggcggcggaggcatgaaggacgccggccgtaaacagagatgggtcgggctgagagattgactcgagcgaggccggatcgggctgcagatcgggcttcgggcggccgtggtggatggacagagtggacggcagacgttgtttcgtcgaggccgaccgcgaaaaacggcgggcgttcaaggcagctgtagaagaaagttctggcagggccttggcagcccagggacttctaacctgccttgcgactgggcgcgagtgctggccggccggaccgaaacgacgagaaggcgagtcatggacacgatttctgcaaacccggtcagcggagagtcagctcggatgagatgcagggggaggtcaaagggttgatggcagggatggcagtcgagcggacgttggcttcatcgcggctgtcgccgcggccccgaccttcatttcagggccggttcaacaaaaagcgggtagccgtcgaaagccctccaaccttacctcaacccctcgcggcgagagcacaacggctgacactggtagagggtacccctgacatagggatcatctcgacagcttacctcgtgcagcatacagggaggagggaggcaaggggcaaggggcaagagggtccgacgtcgttgctagggtgacctgcccctggcgactgcgctggcacgcgtttcggagcctcgccttttcgcctctggctcatgctcttgcttcctgacccctcacgagcatcctcccactccgtcaaatctcattcttacattttgccaaaggtgcgtcttccccttacgcgggactgtagcaggtcgaggcggtcccgggcagccgtttggccggcagggcgagggcagtggcagcgccaggggcaacgggagcccggcgacagccccgtgccctggctgcgacttggcctcgctcaccctctggctctggtccagcggctttttggccgcctgtccttcgaacgctgacgtctctgaacggctcgtctcaaacagatgtctgagtctctcatgttcaagggcaccctcgagggccacggtggcgccgtgcgtggatcgccagctgctctcgttcgaattccagagcacttcctgacctccgcctctccgctcttaggtcacggccatcgccacctcctcggagaaccccgacgttatcctttcgtcgtcgcgcgacaagtcgatcattgtctggcagctcacccgcgacgacacgtcttacggctacccgaagaaggtcctcaagggccacaaccacttcgtctcggacgtcgtcatctcgtctgacggccagttcgccctctcgtcgtcgtgggaccacacccttcggctctgggacctcaacaccggcctgacgaccaagcgctttgtcggccacaccggcgacgtcctttcggtctcgttctcggccgacaaccgccagatcgtctctggctcgcgcgaccggaccatcaagctctggaacaccctcggcgagtgcaagtttgacatcaaggacgagggccactccgagtgggtctcgtgcgtccggttctcgcccaacccgtcgaaccccgtcattgtttcggccggctgggacaaggttgtcaaggtcagttgtccctccgaccgttttgcctcgcttcggccaccaccaccaccgcctcgccccggcgtgatgagtaaaattatatttgctacttcagagcagacgccatcaacgtccatgagaccattttaatcaccaagatctctgaccttcccccctgacaaaacctccatccttgacccgcgccgctttcctccttgctcgaatcgatactgactccaacctgccttcccgtcttgcccaggtctgggagctttccaagtgcaagctcaagaccaaccaccacggccacacaggctacatcaacaccgtctcggtctcgcccgacggctcgctcgccgcctccggtggtaaggacggcatcactatgctctgggacctcaacgagggcaagcacctctactcgctcgaggccggcgacattgtcaacgccctcgtcttctcgcccaaccgatactggctctgtgccgctaccgccgccggcatcaagatctttgacctcgagtccaagtcgattgtcgacgacctccggcccgagtcggctgacggcaaccagaacatcgagtgcacctcgctctcgtggtcggccgacggccagaccttgttcggtggcttcaccgacaacgtcgtccgtgtctggtcggtcaccgcctaaaccggcgctgtccaactggtgcgtccgcccgcgtcccacccgccgcgtagcgcctcgagctgacggccgccttcccttcaccccttcaggacgtcgtcccgctcgatgggtgcctcgttccctcgggtgctattgatgaggcgcatcaacccctccttactccattctccttcacgaaccgtgatgatgcttgatgacctgaggtacctgaagccccttaggggcatgcagggcggttctctccctttggcgcttacctttcgggtccgctcgccttccggcctttcttcgacttacccacggctttcctttccgacggccccttcgctctctttgatctcatgttgcccttcactaaaccaatgtcctgttcgagtgcagctctcgtccgcgagctgttcccgtctggtccgtcttgtctcatggactgttgcggcttgctgcgctgcccgcgctcttcgaagctcccgtcctggcaagcctgacggcgctcatgctgcacgacagcgacaggcgacataagccgtctgacgtctcgcacgagtgatctggtgagagcagggggggggggaggtcgcggcaggtggacatgggaccaacctgggaccgtgcgtcgtcgtcggcaagtcggctgggcgacaacatctcactgacgctgcgtcgcctcgaccgcacgcccctccctccgaaccggagggcggatcttgaccggggccggcttagtgttgaggacgcggaggaggtgctcgagggtgctttgaagagagaagagaaggacgagggcttgctggctggcttgcgggtggccggtgctcgccagccaagatggccgcctcgaaatcggcctttgagggagagcggccggggcgcgcggcggggcggggcgcgggcctgcgggaaagtcacacgcgtcggcccagacagcacctgcagattgccttggacccgcctcctccttcagtgcgcagccgttcgctccctttcacacggcccttttcacacgacgcgacgcgcgagttgtgcctatcaaacgtcctcctgcgcgcagcggcctgcgcaacgtgctcgttcaagaggtatagctgtacggcggtcatccttaatcctcctgccaggcgacctcgccccgaccccagcgctcgctccagagcgcacgcttgtggtagaccttgcgcgcggccttgaagtcgcggacaaactcttccagctgacgggcctgaatctgctcaagagtcgtgcgcgcaaggacggtcgtcagctcgaggcgcgcacaagatgggggggctggagtcgcaggtcgcagatcggacgtacgcttttgtcctgcgagagcgaagccgggtcgatacccggcaacgacggcgtgtcggcccgcgagccctcaatgtaggccgatgcgagcgcctcggacgtgtcgtcctgctggcccatcgcatgtcgtaaacggagcgacagaaagttgggcgaatagcgctgcggatccgaaggaaagcgacaaccggccgagcggacgtcagctatgcagtcatcagcgatccctcatcgccatgaacgagcagccacacctggtaagccgaggcctgtgacctctcgatgtcgcgccagcgcgctttcagctcgcgcgcctcggcaaaggcggccatcgtctcggaccggagctgctcgagttccggccggagcgccagattccgttctgattcgagagcagattcacgcgcaagatcgtcagtagggatgcagcgctcggtctgtagagcgagatacacctgctattgcctcgttctcgcgctcgatcgcctcaatctcgcgcaggagctgctcgacctgcggcaacgtgtggacgaacgcctgctggtaaggttcgtccgtcagcaggtcctgaaggtcttcccgtctgaccgtcgtcgaaatagcaaagaagggtcagcgtttgaccaagcgtgtggatgggccgggcagagttggggacggacgagagcgcctgcgcgtgaggaaaggcctggagaagtggggtcgcggccgccgagctggaccctgaggagcttgacgggagggctgacgcggaaggagctccgtaggactgcatgctgaggagttctgctgggcgacgagctaagtgaaaggagagatggggttgatgcgagatggctgtccacgggcaacgacagtcgtgccgccgcagctggccgaagagctcggccggctgccgcctctcccgactgacctcgacgccgacctcaacttctccccttcagaccgtctgctaggagcagagctaggacagtatgtcgaacctcgtgcgtgccctgcgtcgcatcatgccgtcgttgctcgtgagagtagccgctgacttccgctgacgctcgtccgggcagtacatctatgagccagcgacgaacggcaaggtcgtcatccacacaaccatgggcgatatcgaggtgcgctgagccgagaggccatcctgctgagctctctgagactgacctcgctgccatgttaggtcgagctctggtcgaaggaggcgcccaaggcgtgccgcaacttcctcgcgtccgtccctagctgcttcctgtctggctgctgcgaacgcgtgctgaccctggctcttgctcccgtaggctcatcatgttcgttcggcccagctggtgaccagtgggtaagcttccactgacaggctacaattgtttacctcacagggagggctactatgagaactgcatctgtgaggctagcgtttgccttccagctccgtgccagtcgtactgaccgtccttgccctgccgcctccccgctcagtccatcgtatcgttgccaacttcattgtccagactggcgacccgactggaaccggccatggcggcgaatctttctacggaggtgcggcttcctcctctcgcttcgcaagtcgctggtgtgccgagcgcatggcaacggcgacgctgactgaccgacctcccgctacgtccagagccctttgaggacgagccccatcagcggctcaagttttcgcggcgcggtctcgtcggcatggccaacgataatgtgcgcaactcgaaccgctcccagttcttcatcacgctcgaccggaccgacgagctccagaacaagcacacgatctttggcaaggtcgcggccgacggcaacacgattttcaatgtcatcaagattggccaggccgaggttgggccggacgagcggccggtttatccgccgaagatcaagagcatcgagatcctcgacaacccgttcgacaatattgtcccgcgcatcaccgcggccgagcgccgtaagcaggagcagcgccggcgcgagtcggcccgcgagcagcgcgagcgtgaggagcgcaagaaggtcaagaaaaagtgagcctgcgtcattggactctcgatcccggcactcggagcgctgacatccgatctgggcgccgcgcaggaacacaaaggtgctcagctttggcgacgaggccgaggaggaggaggccgaggcggcgagggaaaagaagagtctggtccgacccgacagtacgtgctgtcgtcgccacgcaccgctgcctgagtcaggtcaaccggctgatttttttttcttggcttgcagtggatacgacggcgcccgagtcgatactgtccttcgagtcgcttccgccaccgccggcatcggtcgcctcggccagccggagccggccctcgcgggaggacgaggacgatgccaagccttatgtgcccgatctgtcgaaagtccggcagaagaaggtcgaggagggagattcggccgcgtgcgtggcctctcctcgctctgcgctctcgccgctcacagggactgactctgctgttgcctattcgcagatcgaagcgacagaaggaaattgagaagatggaggtgaacctccgcaagacgtcacgtcgacggtcggcttcgcccgactcagccgacgagcaggaggcaaagcggcgcaagggcccgtccattctcgaggccgagctcgcagcctacacgcgcggccggtcgagcaagggcaaaggcaagggcaaggacgaggacgatgtcctggccgcgctcagccgcttcagcaagaagctgtctggcgcgccaaaggagaaggagtcgacgttcgagggcgacagcgccgacgcgcccggagctgacgacgacgacttccagctcggcgaggggctggacgtcgacgacgacctcgactggatgggtcacaagctcatcgaggttcgagctgatcgcgacgccgaggtgacgcgccgcgccgaggctgactacgaggtgcgctctccattcgtctgtcctctactcttgcatcgacctgaccgacctgcccctttcttttcaggtcatcgacactcgaaccgacaagggccgagggcacattgagcctgggcgcagcggcggaggtgcacctcgcggccctccaggccgaggcggcgacagcaggagcggcgacggtggaggacgtggcagcggctcgcgcacggcgtacaacgtcggtcgcggaggcggtcgaggcggcggcggcggacggcgcggctgggattgatgccagcagtctgcttgagaaaccacgccgtgcccagcctttttggcggagtgatgagtcgtcgttgcagggtggggccgagcctgcggtgacgtggcctttgcggaagctcgctgccgacccttcttaaacccgacctctcgaagcgaccacctttacctcccatcacccaccctacctcccaatctactacctctcttcaagccagcatcagcatcatgggattcaccgactcgaccgacaccgagggcaaggccaaccagaagatgtgcgtccactccagcagccggcgcgcagcttccatctctctccttccgagcggagggctgacggccatcccctctgcccccttctgtttcccttcctgcaggtacggcggtaacctcaacgcctttgattcgaaagtgagccccccctcttccttcctgcaggtacggcggcaatcttaactctttgacaccctttgactcaaaaaggtgaacagcaacatgccgcctggctcctctggcatcatgcctgagtcgaacccggacttcagcaccggcccctcgagcacgcagtaagtccggcagcccgccgtcgcctctcgctccgagtctgcgttgtctatagctgactgaccctgacgctctgcttcctcccgccagcgtgaccgagggcaagcccgtccagtcggccgacgttgacgtctcgatcggcgacaagaatactggcggcacgaccttctcgagcaatcaggatcagcgcgccggcacctcgcacctcgaccccggccaccccattaacccggaccgtgccgacgctggcaagaaggactactcgccggtcgacaagctcctcgcaaagatcccgggagtccacccttcgggcggcgcatagagtccctctccctcctaccgcaactgtatcaatcctttatagcaattttgacgacattgacggtctcaagaggaagcgagcgcgttgcacaacaggcctatttttgctcaggggctgatgggcttccgtctgcttgagaagggttgcaaagcgcggtcaggaccagccaagagtcaagacagaagcccaacgcttcgttctacccttatgcgatgcagcacctcactctctgctctccgagcctcccaccacactcaagtctaagatggttcactttcgagagggggaaaattatgctgcaggttcataaagaagatgcagcacagggcggtgctcggcgccgaaggcgggcgcaagcgaagcagtggtacttaggcgagggcttaggaggttggcgcgaaaggccggcgcggacgcggcgacgtcggcgggtcgctatagcgggccgaagtctcgcagatcatcttgaacagacggaggctggcgtgaagcgaatggcggtcgcgggcaggccgacgttggtccggtcgctgatcaacttgcgcggcacggaaggccgctgggtactccgttcgagggagacttgaggtgtaggtgggacgaggctgggagctatgctccgagccggcttctgtcctcgctcagggcagagcagagtggcaaagcgagggcgagaccgaccgccggtggaaaggcgactcgggcgagcggatgagggtcgacgagcggagccgcatggggatgggcgtgctctcagcggtgggccggtggtgctggagagcgacaaccgagttgcgcgagcggaagggcttggtcgagcggcctggaggggaaggggagagggtgggcgggtcagcaactgcaagtgtgtgcaagcgtgcgaaggatgacgcaccaatcgaggcggcggcgggcgcagatcgcgagggaagggtggcaggcatcgctgaagaggagagcgttggccgtggtgggttgggagagtcggttggtaggttggctcgtggtagggcggtcggctggtgagtgagaagagccagacaacgccgctgccctcgccccctctatgtaggggcggcgacggctggctgcctctcttcctgcgatgctgctcgagctcgtcctggctgcatcgaagaaaggcggtcaaaagaattactaaaggcttaggaatcgcgctcgccacgcgctctcggcgtggtctgacgtacgaagttgcgatcgaaagcctgaaacgacggcccgtcgaccttgccgagagctcgacgccacaggtatcgctggctgcagcgccgaagcctgctgtgacgggagcagagcgtacgcatccctggaatacaaacgacgcgtcggggcttgggacgagagagagagacagggaaacagcgccagagccttgcggcggagcgagcgacgagagtctaggcgactgggcgagcgactgaagggagcagcagcatctaagaggtagcgacggccgccggcgacggcgacgacgacgacgatcctattgcggcgaggcctggaagcaggctcagcgcttgacggaggagcgccgctatctcatcccttgggctgccggcgcccttgggcatgccgacctcgacgtcctcgagcgcgtccgtcaacgttgaccgcgcgctcacgtcctcgagcgctgcagcgacggcggcgtcgccagcgttggcctcgaggacgccgacgaggacgacggcggcgcgatggatgagccctgggtgagctgcgcttgtcggagagatggtcggtgtcccgtcgtcgttgtccgaactcgtcaaaggaaggagaagctcgagcagcgactgaatcggccgcgccggcccttccttgcggacgagcatcagccgacacgcagtcggtgatgatgcgagggtcgcgagagcgccagacgcggccagctgggtcggcacgtccgagacggtggacagcgcaagtaatatgtgcagccgcttctcggctgaccgggtcgatgccggtcgtgccgtctcggatgccgtggtcatcgcgggctcgccggaccaagcgaggaagatgggatccgctgcaagcaggttgcacagcagctcggtcgccgcccgacggacgagcgcgttctcgtcgagcatgtgatcctccatcttgctgacgatggcccggtcctgaaaggccgctatgcgctcggccattgaggggtcgaccgaggcaagattggtaagcgccatcagcgcctcgaagcgctggagcaagatcgacgactcgtgtgcgaggagcgacgcaagaggtcggattgcatcggccgcgttcgatgctgctgacggaccgaagacgacgaagggcgaggcggtgatgagcagcttggcgagcgcctgtaaggccggcagcgttccgtcaagtgtctgcgccggattcgaggttggcgaagacgacgacatcgcaggcaaagccagcaaggacgaacagaggccgaggagtgcctttgcgccgccggccttgatgatggtcgcccgctcagcttgaacgtgaacaagggcaaggaaggcacggccgaccgtctcgcgcaccgttcggctctcgcttcgaccaagggagacgaggacggcgatgacgccagcgtccaggagtctcctgcttcgtcgagcgacgaccggctctgcctcaaaggggtcatcctcgactggcggcgccttgccgccttgcttggctagcgtgagcttgcggagccggtcgacctgagcctcctctgtgctcaagatgggcttgtaggccacgagattggcgatgatcatagcagtgccgtactttagcgaggaggcgctctccgcctggattgctggggtgtctggcgctgggtcgttgaaggcgcgggcctttggcggcggcgggacgacagcaaagagctttgcgaggaaacccgggcttgccgacagcagctccttgatcttcggccggtacgaggtgagtgcgaggccttcgaccgcatcaacgacggctttgggctgcgagttcgcagccgcgacggctgacgactcgacaatgcccttgaggacgacggcgagccgctcgtcactcctgccaaggaccgcctcgtcttcggccgccaccgggtctgctgcatctgcagcgctcgatccctctgcgccttcgactttgccccgcgagagcttcgcaagggcgacggcggtcgatgctcgaagaccggcgtgcaggctgcttgacgacgactggcggccgagcgtcgccttccaatcgcagccttccgagagcagggcggtccggccctcagccgagttgcagatctggctgatgaggtcggcgagagcaagcacgacgggcagggccgaaggttccgagggagagaagatgtcgaccaggtcgtagaggttctcttgaaagcccggccggcgcacgatggcgagcgcagcagccggcccggtttggcagagggcggcgaggagggcgagggcctgctcggtcgcgcgcggatcggtccctacgaggatgtcttcgagccggggtgcgaacgtctgctcgagcgtcgctgagctcgccgcctgggcgcttgcgagctgggcgaggacgaggaaggccagggaccgggcgcgggcgtcgacgtcggccgggaacgcgccgagcaggagatcgatttcggtcggctcgagcgatggcgaggaccgaccagagagtgacgtgagcagagcagcgagagaagcgtctgatccctctggccgggcctggccttgagccgaaggccgagctgctggcggcggcggcggcggctgcgacctacgaagtcgggagggcgaggtcaggtcgaggtcagggctggcaggatgagatggtgaggcgccgggagcgcgcagcccgagacgagaaggacagcagcagagcagactgacgggtcgtctacgagctcctcgagcgtcggcatccttctgggcgaggcgaagcaggatcgatgggtgggcgtgcaaggggtaaaggggagggagcgacgtctggctggtctaaggggccgaagcccaaggcgagccccaagcatcggggcctgccgtttttcgtcccggtgcgatgcggccagaaaaatccgcgcagtcttttcgcgcgcaggcgaaagagagaagggggggcgggcgcagcggccctcttgacggccgtcgcctctctcctcctctcgcccttgtcctccgtccctgcccttcgatccgcaacggcctctatcgcatccagagcgcccatccatccacacgtctcgaaaaagcgcgccgcagcctttctcgagcccgcctcggcccgcgcgacccatggagacgtcccgcccgccgtcgagcgaccagcacccggcgccggcgctgccttactcgtcgcatcacctcgcgtccggccgcagcagcccgttcctccatccggcccagcaccagcaccagcagcagcagcaacagcagccgcaggccggccagcagcaggccggtgcgatgaatggctacgcagcaggccacacgagcgccggcggccacccgccgcacatccggacccactcggccaacgcggctttcaccctcggcgccggcatggccacgagcccgatcacgccgtccatctcaagcgagcgcggccggggcgaggactgggcggcggctgagccggctcccgagcaacagcgcggcggttcggtcggcgagacgaacggcgagcagcaagacggcgcgccgcagcaagagggcgacgagcagcagcagcagcagccggccgggcctccctcgaccgacaacggcggcgcgtccaacgagcagcactccggcgactcgtcggccaacggctcgctccaggtcaacccgggctggcagaatgctgacggccagtcgtcgcggccgtcttcgtacgtcctcccccccttcagccagtcgcctgcctcttttacgcccgaccgcccgcgcgcgggcgcgtgctgcgctatcgggccccctccgtcgcgtcgttcctcccggctgacttctttaccccggcccatccagcacggggaccaccgctcagcagcaggctgcgatggccgctcaggcccagtattacgcccagcacccgtcgcagttgcagtacatgtactacccgcctgcgatggcgggcgcctatggccagcacctcgcctcgcagccagtctactcgtcgcagggctacgctcagcagcagcaggcctacgcgatggaggccgcccgccaggtccaagctcaacagcaccagcaacaccagcagctcggcggccagcagacgtcgtcgtcggcgagcgtgagcgcccacccgaactcgcccaactcgcatgcggctgcgctcgctgccgtcgcagccgctgcggccggtcagatgcccgtcggccagggccaggggcagcaggcgagcgtcactgttccgggcggcggcgcaccgtactacatgccctattcgtacggcggcggagctcagccaggggcccaggcgccaatgtaccactacgtctcgggcgtcgccggctatccgagcgtttacccgcagccgctctaccggccgccctacccgacttctgccctagcggcgtcgcactcgcagccgctatcgatggccgacgcgcttcaaaacgtgccagacgaggccggtccgtcgagtgccaaccacgcggcctccgacgcgggcggctctgagtacagctcgatcctcggtgcagccgagcacgagctcgaggccgacgaggagcagacggtcaagcctacgccagccccggcccggacggccacctcgtcgcgcaagggcaagcgcaaggcgacggcggcggccgagaagcggtcgagcaacgaggaccggcaagaggaggttgagatcccggcgccgccgcccgagaagattctcaagatgccggtcgaggccaaggtgtcgaagaagcggcccaagcgcaagcgcccgccgggcagccaggccggcaaggagaagaagcacggctgctcgttctgcggccggtcctttgcccgcgcctacaacctcaaggtgcgtcactcgctccctgccgagctggaccgatgcgttcagacggccgctgaccgagagctgttgttccgtcccacctctccagacgcacgaggagacgcacttgatggaccctccaaagccgtacatctgcgagcacgattcgtgcaaccacaagtcgttctcgcgctcgcacgacctcatccggcaccgcggctctgtccacaacgagggtccggccgcgggcaagcccccgcagaagaagacccggccacccaaaaagaaggtttctggccgctacgatcctgatggcccgggcgagagcgcccagggctcgagcctcgaccacgacgagaaccactatgccgacgagagcatgacgacccagggccacgacgaccaccagggcctcgaccacgacgacgacggcggccaccacctcgccgacgggaccgagatggcccacgacgagggccacctcgacgcgcagcacgaggacggcggcctcggcgacatgcccgagtacgacccagagctgatggactctgagatgttccacccatcgggcggcaacgacgggcctgtcgtggacccggccgtcgcagccgtctcgattgacgcgctcggctttgacgtcaagcctggcggttcgtcgacggcgtcggccctgctcgcgggcggctactacccggtcgtcggcggcgaggacgcgacctttggcggcaacatctcggccgcggcaggcggggttgagggccaggaagagggcgaggtcgagcatgccctcctcgacggccaggctgtctgaagcaggagggcgacctggcgacaggcgcgagcgacgaagctcgacccgcttttctcctcttttttcggttgtacaacttctttggcctgagcttctccgcccagcacctctctcttgcctccgcgtatcgcatctttccgtttcaaagctaccatcagggaagccgtgtcccgtcttgcgcgagtgcgaacgtccgagcgcagccggcctgtcggttggccccccccccttttgactaccgccgacgcgcctcctttcgacgcggcactcgacctctctctcccgacgaccaccctcgcctttccaccttcgactcgctctcgaccctagcagacctcacccatcgagatctcctcggcctgtgcatcaagccaccaacgtcctccgcctaccagcgtccatggcttcatccgcagcaggcccgtcggcaagtctcgccggcgatgaaggggagccggcctgggtccaagctttcttcgccgccactcctttagagagcggcatgctcgacgatgtgacgcacgattgtaatcgggtacgtcactttgcctcattgccaggcgcgcctgttgcgcatcggctcggtcggccgctcagggaccggcactgccagggaggaaggctgaccgtcgtccgaccctctttgcttggcggctcgccccaggacgacatcccacacggcctgcagacaggctgcgaggcgttccagcgagccgaccggcagcacaacacctgcggacggtgcgagaaggttgaccacgacagtccgcgcgttacctgcgcctcctgttcccaacgaggttcgaccctctctctgccgcccgccgttctggtcccttaccagatgctgacctcgcgcttccctcaggcccacacctctgcgtctcgtgcgccaacgagaactggaccatcctcaactacgactggcagtgctcggcgtgtcgagtctgtcaggtctgcaaggagcgcggagacgaggtctgagctgcagtcgcccgacgttcgttggccaacgccgacgagctcagtctaaccgtccaatatctcttctcttggcagatcacgctccgaggctgcagccaatgcaaccgggccgtacaccgcaagacgtgcgaaggggtatatccttttcgcctcgccatcctgccgacgtaaagctgactgaccgccgtcttgcagctcttctgttatttgtatcggcatcagaagggtctgctgctctgtatccagttggtcatccggcctgtcaagtctttgctgagatccggtactgccctccagattccctgcccgacggcttctgcattgggtgtgcggcggcaccggccgaccctttgcagcccgagctcagtcctatcgccctcgacgtcatgccgacgccggagccgaccgtcccgaggcgtcagcgtgaatcggctgcttttatcgcgaggattaaggacaaacggtgcgctcggaccgaccttcgcatcagttttgcgaaaagctaagggcatactgctgacgtcgagcttcctctcagcgaggctccgctgccgatcctccctttcgagctgcagcgtctcatcatctttgaagcaattgcctcgacgttagccgtctacgagggagctgatctcgcttcatggcgggcgcgacagacattcctcaagcgggcctgcgaggtgtccaccggctggcgcgtacgtctcccttctgctcgccgacctgcaacagctcgcatcagcgctgaccttctatcgacggcagcacgtcgcccagcccttgctcaatcggcagccgcttttcgccttcaactgggacccctacaaaacagacgaactggaaaatattctcactctgccccggcaacagtggctacggtctttccacccgcgtccggtaacgatcgatttgggcatcatctgcagcgctgccggcgagccagagctccctttacgacgctacgcggggcttatactgccagccttgccctcgttgcctgtcacacagctcggcgcgcgtctgttgccgcctctcacctccttgaccctggaaacgggcccaagtacctgggtggctgccattcattatctgatcaagttcaatctgggcgggctagagcgcatctgtctctccgtcctcgatcggctggatgccaccctggggcacttgcaactggatctgccgcacctcgtcgatcttcgcctcggcaccaccgcagtcgatctcgccgagtctgaaggcctgcaggtcatcctcgcctcggccgcgtcgagcctccgcatcctccatcttcacacgaccggccccgtcacgatggacccgcagctcttcgacgggctcgagcagctggaggaattgtcgatcagctcatggcagctcgctaggctcttcgaggacggccgcctcccgaacctgcaacgtttgttcgtcggccagccgcacatcaagatggacgagctcctttggccacaggacgacgaggcgctcaagtcggtccagaagctcgtcgtcactgctgggcgcgcgatccttgtccatcgacgtggcctgcgactcggcgtctgggacctcgatttcgccggcacgtgcgtctgttcaccacgcgacccggcctctgcgacgaaggctgacactggccctcccgacttgacaggcaccgcacgtcgcccatcgtccgagccatctctcatttcgtccagtcgaaggcgctcatcctgatggaccgcgacggccgccagtttgacgccaagtgggcccgcaagcccgtttttcggccgacctttggcagcggctgggacgcgcggagggcaaagaagggccggaagggccaggcgcgaaggcgggcaagtgagcgtctctgatcgaagcttcttttcatcatggcgcttcttcggccgggccgccaggccgaagccggcgcaagtgtacgccgccctccttgaggatacgcgcactctcctcgtccatcgcgtacgcgaggttgtagacgacctccttgacgccgctctggacctgtcaggggcgcgaatcgcaaagtcaatggctaggctcagctgaacggagaggtgaggagtggagcgcacgatcttgattgcacagttgaggcaagggcatctgtgagaggagcgagaggcctgcgcatcagcttagggcgtgaggaccgacaggcaatttggacggacgtgttgcagtacaggatcgagtcgacgccgattcgctcgcggccggcctcgagaagggcattctcctcggcgtgcagacagaggcacatattgactggcagcagcgccggtcgtcaattataacaacgaagcgggcaggccgagcatcgaggacgtacgaccgccacctccgaccgtacccgagttgcagcgcgtgcagccgccctcgttgcagttgcgcatcccgcgtggcgtgccattgtagccggtcgagacgatgcggttgctccggacgagtagggcgccgacacgacgcttcatgcagttgctccgcagactggccaggctagcgagcgtcttcagggccgcaagatgtcagcatcgttgcgcaggggcgtggccgcgcgactgaccataaagtagcggtcccagcccggccgcaagcgctctgcgtcgtcgagcttgagcttgacgaggtgcgcatagagagattcgaggtcggtgtagttgttaacgaccgccagcccgacaaacgtcgtcaggtcgttcagcggcgacgaatcggcgcgcggtacgtgcccgttggcgaccggagcgactgaagacgaagggccggtgccatagagcaactcgtccgactcgagcgcaaactgggcgagatcatctgcgctcaatgggcggccgaagagggccgctcttctgaaggagcgacgaacgaagagagggccaaatggaaagtggagggggtcgacgcgacgcgtttcgcatggtcagccggcaggcggtacagactgggtcgtcggcatctgcgactcacctctggaagcggaccatgagcccggcgtcgacccggacgagcaggaagctcggtcgcttgccaaactcgtcgagctccgagagcggcaaagggtctgtcaggacgagatgtctccgccagtgctgcgtcgcgtagacgaggagctctgcggcgtccgagaatgcaagggaggcgccgtcgaccgacgaatccgaccggtcctcctggagaaggcacagcatgacgaggagaagggtgagtcaatctacagccggcgcacgagccggtcggccatcaagggtccagggaaggggcagctacgcacgacgcctagggagacgcgctggaagccgcgctcggcaacgagccagcaggcaatctccttcttgccggagagcggcagtccgacaagtgagattagcatgctcacaggttgtgtgtgctcgtgctagagagaaagatgctgagtccggtcggcgagcagggttaagggcaactcgtctgggcatgaacgcgaccgactcgagctcggctcgaacgccctcccgacaccgaccccttcgagcgcctcgcctgccagcctgccagccttcctcaacctccaagagaagcttgtcgcacagctgtccccgctctcagcctcgccaccaatcaccagtccctaggtacacgaccaggtgacccgaggaacgtatagcagctcctaggccgcctcagctatgtcgtccgcagctctcaccctcgagtcagtctcggattccgctcctcgccgagtatcgctagccgagctgaccagctcgttgctcatcctctcagctctcctgcgctcctgaccctcgtcctcgacctttcgccactcgcatggcacgacgcctccgcgtcgggctcggcagcagcgccattggagggccaggctgagagcctgacactcaaggcgatgctcgcccaggtactcatcttcatgagcgcccatctggctgcgactgcgggtaaccggctggccgtatggggcgtcaagggccgcaagaggtgcgtcctgtctgttgtaaagctgctcggctcgctgcccggtgctaaccgagctcgccgctcaactccagcgtgctcctctactcgtcatcggaagggccagaacgggaccgcaagcccgacccaaacacctacgagccctttcgtgttgttggagacgcagtaggccggcgcctggaagcgttcatgacagaagatgaggagggaagcctggcctcgggactcgcaggtgggtcggcattctgccggtcgctgctcgagactcatcgctgattgagtcgaatcgctgattgagtcgagcatcttcgcagagtccacgtcacttgtcactgcccttgccaaggcgctctgctgtgcgtcctgtccttgttgcttgagccagggtcatcgttaagatcgtccaatgtctgcctccctctcctcagacatcaaccgcttgagccaggcgtccccgtcaatgtcgaccgttgcgcacgccgtctctgcctcgggcgcctcgggccaacagcccggcaagtcgggcgcaaacgcgcgcatcctcgtcatctcggccggcgaggagccgagcgaaggatacgtcagcctgatgaactgtatcttctcggcgcaaaaggcggtgcgtcgaagcgccatgtcgcagaggctggcctactgctgatctcccactctcctcctgctctcagaggatcatgatcgacgtctgcaaggtctcgggcggagatgcgattttcctccagcaggctgcacacctcacgggcggaatcttcctccggacgcaacaccgctcgtcgctgctccagtacctgatggtgcggacttcgttccagtagcggttcttttgaaccggccacaaggctgacttgcccacccttcccggcccttagatgacattcctgccgccacggcagatgcgccagctcattctaatgccgtcccaggagcgagtcgacttccgggccgcctgcttctgccacaagcgcatcatcgacgtcggctacgtctgctcggtctgcttgtcgagtgcgtcgggcagacccttctctttcagctctagactgaccctttcgctttgctttggccgaccggcagtcttctgcaagccgacgccagtctgctcgacctgcaaaactaagtttccgctcaagactttgcaagcgctcggcgctggcatgcccaagccggccggtggcgctcgcaagtctcggccggtcagtcgaggcgcatcaccagccctggcgcgggtggtagccggcagcggcagcgcatcgcaggcgaccagcagcccgttggcctcaaacgagccgatcgtcatcgacgacaattgaaaggatgccagcttttgcgattagcggccagaatgcaattgcgagggcatcattagtacagacagaacgaaaagggtggggcgccgcagacggagacgggggtatgagcaggaatggaaggagaggccaacaggggacgggcggacagggcggaacgtagagcatcaagcgggggtgatcgccaacccgccggccgtcgctgaaggcggctccattgacgcgagtttcgactcgacccactggtccatcttctgcttcttggcctcgcgccgctcgacgcccttcgtcttggccgcctcctcatcggcgaccatcttgcggttcaggtagtagtcggccgtctcggggacgaagaagagcttgaacgagccgatgcagaccttcatctcaaggccagactcggcaatgaaggctgatggcggcggccgcaccgtccaaggctgaacggtccggcgcagcagcggtgcctcgacctttgccgggaggccctcggtcgggtggccctgaggagcgggagacagcaagcatgatcaattcaggctgcgcgtcaatcaaaaggacagcaggaggggagctcacggtgatgtagctcgcgacgtaggccttccacttttgctcggcggtaatggcgtcgtcaatcgtcaggtcgtccttgccgagcagctgaaccagcatcgtcttggtctcgtcaacctgcagcagcaaaggggggggggggggaaggcgtcagtcaacagcaggccaaggcgtgacaagagagccacagcagaacgcacccattcgagccggaagaggctctcgtcggagccgacgacgctctcggcgttcatgcggtacgagatctgctgccgggcggtcgacacctcggtcgcgcggtcggcagcgagcaaggcgagtaactcctgcgacttggcgtcgccgaggatcgtctggacctgagtgaggggtgaaggagggtcagcggtcgtcagcgttcggtccgacaagggggtgcgagcactcgaatcgcacctgcttgacgatggcagcgacgagcttgtcgagcgtaaagctgacgtaggccttggtgccgtacatgtggcgcatgttttcctcgaagttgtactggtcaatctcgttatcaaagagactctcgcaaaggtgcatcgtgtgctcgtaaaagtgagacgacgggttgaggccggccatcagcaacggcgagggcccaccgacgtcgttgaggccgagctgctcggcgagcgggttgacgagcgtcaccggcggcgtcgcctcggcctgctggcggccaatctccttgagggtcgagatgcggttgtagagcatctggacgagccggaagaggcagtagaccggcgtgttggtaaagaaattgcccttcttggtcggccgccgggcgccgtcaccgccaaacgagctgagcgcgggcgacgacgcgcgcgagaggtggtcgtccaccttggccgagtcgtcggtcgccgttgtgatccacgtccgctcggcagcagacgtcgaagccgagggagcggcctgctcggactcaccgccggccatctcgacgtcctccttgtcacccgacaccggcgcatcggatgcgggcgcgtcggcagcagagggcgcggtcgcgacaccgtcggtctccatgacggtcgcctcgccgtcggtcgacgccgtgggcgctacgccctcctcgccgttgacactcgcaggggaagcggccgcttcgggcgccgccgaaccgttcttcttgagcgggccaccagcagccttgagcaccttgcgccggaggtcagaggccgacttcttgcccttacgcgacgcggtcgactcgtcatcgtcgccaaagccgctcgtgccgtcgctgaggccgtccgtctcgctctcgttgtcgccatcgtcgttggcgccgtcggtcgggagcgcgaaggcggcgtcaaagtcggcgtgcgggtacatgaggaacgtcggcaggagcatccggaggaacgactcgacccgctcgcggtccgtcatcgagatgccgcccggggcgcggtccaggtacgaaaagacgagcttgagcgagtcttgcaggcagtccatgtcgtcaatcttgaacgcatactggtacttgggcttggcgttgagcgagggctcgttgacggcgtcgcgccggtgagcctgctcgcgccggagcgcctcgatctcggcgacaagcgacttgctcgtgatggccttcttgtcgttggccttgaacgtaacgccttggtgatcgagcgacttgtagaagctcttggcatcgacctcgcgccagaccttgttccactcgcgctgcgcccgcttccactcctcgtccttctgcttcagccgggcgaggacaaccggcacggcgacggtcgggttgtcgtgcagggcagcaatcacctcgagacccgggtcgcggccgtagatctttttgatgatgcgctggtatatcgacttgctctggccgccgagcccgggcttaagccggaacgtcgacttttcgtccggcgtcatgacgttgatccgggccgcgatcggctccagcagggcaatcgtccgcaggttggcctcgatgtggtagtcgtactcgtgccgctcctcctcggcccggtgcagggcgtcctcgtaaatgttcttgcggtgggcgataaaagggacggcgtcctcggacgcgctcgtcggatgcgagacccactcgtcgtttaagacgtcccagcacatggggtctcggccagagcacgacagattgacctcctgcggcaaaaagacagcagacgatcggtcagccggggcgctgcagacaggatggcacgagcgaggcgagcctgaacagccaacgcacctccttcggcagcttgcggtagctcgcgccataggccttgcaactgttgaggtcaacccgaggccggtcgacgctgagcgtgttctcgagcacgccgtcgagcccggcgccggcgccaaggatgccgccgctgccgttgaggccatactggccgccgacgccctggataccgccccgacccgcctggtcgtcgccgatgaggccgcggaactggttccaaatgtcgcccgactggccgataaagaggtaggcgcgctcgacgagcacctttgagtcgatgatgtcctggacgaaaaggttgagcagcttgaggaactcgtgatacgtgtccttgttctcgatatacttcttgacgcgctcgaaaaaggcaatctcgtccgggcaggcgaggttcccgttcgggttgccgggcgccggatacgccggctcctgggcagcaaagtcatctggcggcggcgtcgcttccttggtgtgcgagtgcttcgtcttcttgatctgctcgagtgttgccagcttgggtcagctaacagttggcttagcctcgatgacgggaacgcacctttgccgagacatgcttggcagcctccttctcgtttccgagcggccgcttcttctgcttatcggcgccagccgagctagcagcggcagccgcggccgcggcgtccttcttgttctcgcggtcctttttctcgctccggacctgcttcgccttgtcgcgcgagccagaggcggcggctgagccagcgttctggcctgcgtcggtcaggccggagacgccggcgccttgctgggggatgcccgtcatctggccgatgaggccgccaaagaggttactctgcggcgccggtgcgccgttcgaagtgtctggcaggaactgcttaaactcgtcgagcaggtcgggcgcgttcttgaagaggatcgtcacctgggcatagacctggcaggatgcggcgcaagtggcctgtcagccggggctgccttcgacctcggaaagggtcaagtcccaacgcacgtcctggatcgggcgctgctccttctggtaggtctggagaatctcgaggaactgcttgtacgtctcggggtcgttcgagaagcgattcttaatcttgttgacgtagttgatggcgtggttgaactcgacctgaggcgagctccgattgtccgtcccaaacagcgacggccgagccgcagcctgcgcggcctgcgcatgagggtgcgcacctcccgcagcagcgggtggctgagccgcgtgccctcctgcggctggagctggcgaggctgcgtgcgagtgtccgccagcggcgtgttgagctgacggctgcgccgaggatgcctgaccgcccgatgccgctccgcctgcaggggaagcaccagcctgttccgggtggccggccgcgccctgattctgtgcgaccgcagcggcagcggcagcagcagcggcgttgctcgcgggcagggcagcgaggccggccgagaattggcccgcgatctgcgagacggtgccggacggggtgatgacggtgatgaggccacgctcgtcgccctctccgccaaggcactcgatgcggtagcccggcggaaggaacgtgttgaagccctggatgagcgtcgggtggccgcggaacaaggacgaaacgcggtcgatgacgccaggcgtgtcgatgctggaaggaaaagacacccaagctgttcagcccgcgcttcagcaagcggtcgacgaagaccagagacgtacacctggcccttaaactccttcatgacgtcgaggaagcggttgtagacatcgggctggtcgtggaactggacctggaaggtgacggaagggttgagatgcggacggggtcagctctgcgcctgctcgacgctgcccaggtcctatcgcccggccggcggccagtcgagcacagctcgcacaaggtctcgcaagtagcaagccagttcaagcacgcccagaggcaactcgttgagggccgagcaggctaaggtggtgcagaggtgcgcagacgcgtgcgcgcggggcaagagctcgaccacgaggcacgcctcctgtcgccgccttgagccggccgttgcaaaaagcgcgggcgacgcaccttaacctgatcgaggtacgaaagggcgtccctggacagcgagaggtccagccaagaatcagcacccgtcagatctacaatgcatgcaggatggcaggagagagaggacgaaccggacgttgagaggccggtagttctgctgggccgccgccgaggccgccgagggcgcagcggcagccgatgcagggatagcggccgctgccgcacctgaagcaggcgttccggctgcaggcgaagtggtcgcacccgccgccatcgctcctggagcgggcgtcagctctttggaggccgcgttgccagcggtcgaggtctttggcgagcctaaagtcgtggcggcgggcgtgccggccgaagacggtccggcggcggcggtcgtcgtcgacggcggcggaggtccggccgaggcggctgggttggtcgactgagctgggttgggcgaggccctgtcgaagcggctgtccatcatctcagggcgtctgggccatgcgctcgttggtcgagaaggaaaaggtgtgggtcggcgcggtgaacgcgccgttcccgagcccatcgtcgttcggcgtcgcacggcgttcctgccagcgcgcatcggcaccagcgaaatgcatcgcttctgggtgcgtgtatctttgatgggaagcgaggcagcactgaaggcccctgctcgtcgattccgtcgtctctgaagccggtcgaacgacctttgtcgctggagactcgaatgaggagcaggctcctgcaaagtaaaaggagctaccgtccggtttgagattgcgaccgttgacgcatgtgatgcgacgggcgagccaagaacaacgactccacattgcagaatgatccggccggctgaccggacgtgctgaccggcaaggccagctagcgacgagagcctctctttgcctgagagcgacgaccacctcactcctcccacccagtcatgcccaagtcgctcgccgttggcacgatcgacgcagcgtcgaccttaccgccaggctcgaccctctgcagcccaggccggccagcggcccactccgaccctctgccggcgacaagctcgaggcaggggccctgtctggaacgccttccgtacgagctcctctgtggtgcggcgctgctcccggctcgtcgcccgcctgaccgagcagcgcctgactccacgctccccggcctttcctctccagagatcgttgctcatgctgaccggtccgctgcgctcgcgctcgcccagtgctgccagacgctgcgtcaggcggtcagaccgctcctctggcagacagtcatcatccgtgctgagtgcccgctcgctgccgtccactcggaccgcctccgggcgttcctcaagccacgcgaggacgtcgctgccgccgtgcgctgtttcgtcggcctagtcggaggtgcgtccaggctggccggtaaagcgcttctgctcgacttccttacgattggccgaccgctgatccacctcccgctccgttctcagccggcgaattaacaacgggtgaggaggcccgagcgctcgggcgactcgtccggctgctgcccaatctgcagcatctcgacgtccgggccgactcgatgggacgctaccagggccggatcgatccgctgctggacgaactggcggcctggcccggtcaggagctcgatagcctcgtcctgaaaggcctcgtctactctatcgctgccgtcgggacatttctcgccgtgcaccctggcctcaggcgcgtcagcctcgccctcacgcgtcttctgatcggcacgacccaagccgccgactttgagcacgaaatcgacctaggcgtcgtacccgactttctctgggaccgggatgccttcacctttccagcggctactacaggcctcctttcgaacgcaacgcatgccatcggctcgctcgtcactcttgcctcgctcttcggcaacggactggaccggtggagcctccgagccctcgacatccagctgcgcgtcccgcaaagctctgccgacctggaggcgatcgtcatacggctcgagaccgtcctgcagcatacgccggccctcgcctccctccgcctccggggcgagagcagctcgtgccaagcgctcgtcgaggcagtcatgcgccaggtcccgagactggcatcgctcgacctgaccgactctgtcaactttgcgctcgaagccccgacctcgccgctccagccagaccagctgcggcgcttgcctagcctacatgttcggtctgcgctcctctccatttcagcttgccgagcgagggcctgacctgatgcgctctgtgtttccgcagcatctaacgctccgtatctggggctgtctttcgcccttcccttgtccgccgagcgacaagccggtcgcagatctagcaacaaaggtcgcttgtctgctcatccgctggcgaattgaggcccaagagcagcccggtcaccctcgggcagttctcgagagcgtcagtctcgccaatctcccttttgcccttttcctcgcggcggctcagatccttttgctttccagatcacgcactgccctcaggatgcgagctctcatagtccggtctttgacgagcgcaagcgtttcctcttctgacatgtgtccgccagcagccgcgctcagcacccccccttgcatctggcttcccacccactcgacttgcgtctgtcttaagcggttggatctcatgctcttactcagccaggccagtagacaatgtatggaagggtacatgggtagggtcgcaggtcgagcgtcgtcacttagcgcccttggccttctttgcgggcgccgccttgcccttcggttcgccctgcggagcgggacggtcagcaaggtcagccacagaaaagccatgagagactgcgtgtcagacgcaaccgaccttgcgcttcggcgcggccttcttggacgccgatgcggcgtccggcttggcaccctccttcttcggcaggaccttaaagaagccgtcgagccggccctgctgcttggcgttgaacatcttctgcagtcgagccgcgccggagcgcacgcgctcctcactagacagaagaaagatggaagcgatcagcggcgcggtcgaagcgggccgggcgaggcagatggacgcacttgaagcctttctcgcggacaaggaactggacaagaccgtcgacgtccggcagcgtccactcgacctgcaagagggccggcaaacgatcaggccctgattaagggtgtgaatcgaacagagcgcgctcacctcgacctcgctcgccggcgtaacgtctggcttgaggaagagctggcgggcctcctcccacggccagtcgtccgggacgacgaggatgtttgacctcttcttgggcgctgccgccttttttgatgcggccgtcttcttagccttcgccttcgacgatgaagcggcaggcttctcgtcctcgccggcgtccgactcgtcggctggagcggtgaattcacgatcgctcccatccgagtcctcgtccgagtggatggtgcgacgcgacttgccctttggtgccgtcttgaccggaggcgaggagccgccgacctcatccgggtcctcgccctcgctctcgggcacgacctcttcgatctcggacgactcctcggccttgacggcctcctcgccggcctttccggcttggcggtcgcgcaagtgcttgacgacggccttgagcgaaccgtggtcgcgcatgagcttgagggccattttgggtccgacgcccttgatcggctcgacgtagtcgcacccgaggaggatgcagaggtcgatgaactgagtttcggcgagtcgatcaaagcagctcggtcagcatgacgcatgatcgcgcggcaggctggctcgtcgtcgcgcacctggcccatgttcatatcgaggccctctagaattttgtcgagttggatctcggagatgggcgccttcttcgcctctgagaaggtcaggtgccggaggaggaccggcgtgttgaacgtcatcgtgtccatgtcttcggaaccggcggcgaagacctggcgcagagcaagtctcaaaaagtggtcagcgacaagagcgcagcgaacgctagcggtagcactacataccttgccgccccgagcgagctccgccgcctgtgcctcagcctctcccggcgcctacagtcggaaaggtggaggacagtcagttaacgacgacgaagggaaggtcaccatcgagcgtgggcggaccatgatgacagggatgcccatcagccggaggagccgttggcactcggcattctgctccttggtgacgcggacctggcgccggctcatgcggtcaacgtcctcggccgtacctggagcaagagaatcagcagaccgagcaggcagcaggcggagagcagaagaagcagctaccgaccagtctccttcgcctctgcctcgccctccttggccttctcacggccctcgaagcgcttcttgagctaagaatccgcgccgcagacaatcgggtatcagctccgggcttcgcggcagcgccatcgcgtcctgatgcgccggcaggtaagcgtcagaggacgtacgacaccactcttgaggtctggcggcttgccgtcaaagacgtaggccggcttgatgccgtggtcgaccatgcggagcgtccggtagaaggtgcccatcaggtgcgacgtcacctcgccctgttcgttcatcagcatctcgccatccttctgacggacggcgatcagaaacctgaggaagcacagtcgcataggtcaggaagaggaggacagagcccagtcattcggcgctcgcgactgactggtagagcctgttgaggaggcggagagggaaagagggctgggcgtcagccgatcgtgcccagagacgcgagagctagcaacacgcgcgagggagcgcgggacggacgacatggacgcgtcgatagcgaccttgcggccaaacatggtcttgatgtcgtggtcggtcatggccttgggagctgcatgacaggtcaagccggcatcagcagccacgaccggcgaggtagcaggcaaggagctcgggcgggtctgcaggcctgcttgggcgagaggaggaggggcgacgcaccatgctccgagatgagcgcggtcaagcccctgatacccatagttgtagcagaagcagggcaagcagtcgaaggggcttcgttgctgagctgtcgggggcgatggacgggggttcgatggtggcgggccgggcgggaggagcaggcgagctgtcgacgcgccggaaatgagctcgacttgcgccgcgccagggccgccgcgactcggtacaagcgacgcgctcgtcttcagactgatctcaatttctcgactcaagtcgggtgacggcgtgaagggtcatgagggaaagggatcgtctacgaagagtgggcggggaggattgggtcgaagcggggcggcgccctcctgttcacttaaggaccttctcgaacgactcgcccttgacgctgcggccggccatcgacaaccggacattctgcgcaaacagctcgcgattcgcccggagctccttggcggcgtctgacaaacggcagcgcaggaagagcaggcaagtcagtttgaaggagagcgcgatgaaaggacgagcgggcgcgcacccttgttcagcgggtcgtccgcattgggctcgaggaagaggtactggaggccgatcatgattgcattgaggttgagcaccggcttccagtcctctcgctggcgggtgggagcagagcgaggaagtgtcagccgaatgtccacgccgagcgcgagggtcgacagaggaaagaagcacggaccagctgaatcgtggaccaagcgccgacaatgtcagcgtaggatccacaccatagagcggtcacgacgcaccagattcaggcagacggcgccctcgaggtcgatgttggggtggtagatctgcggcaaggagggaatccgaggtcagtcaggcagcgcaaccggcaacgagaggcctcctctgattgctaggcaccttctgcgtgcacttgacctttggaggctcgtgcgggtagttctggttgatattgaacgtgaacttgaagtggccgcccttgtacatgcctgcaccgaccggcgtcaaagagaaagggtgggggggagggtagacgtacgctccgtcagcgctatgacctccacgccacgcacgacgcgacctgagcgtgtcccgccgcccaacgtaagccaatctgtcatggcgtcgaggccttccgtccattcgctattctcgatgaggagcgaccagctggctcctcgctccccttctctctgcgcacgcaccctcgtccgggtcgatcgtcagctcaaagttgaggatgtcggccgggtcagggaagatcgtcttgatgttggtcggcaggtcgagttccgtgatgtctggtcgagcgacagcaggccacagaggcagtgaaagtcagtgctatgagccagagcgagctcgacggcctcgtccgggaaggaggtcgtccctcggagctccaagctcaagcttcgacgcacccttctgaacacgaagctgggcggcgttgaccttgggcttcttcttggccgccgcctccgagtccttcttcatcgaccagatctgcgagtcaatcagaggagggtcggtcagctccttcgtctccatcttgccggctctcgggcgcgccggtggcgaaagaggctgccagcgaggagtcgcatgccatcgccctgccaatagtagcctcggccacctcggtgagggctcgactctgcgcaccttcatcttcggcaggtcttggtctggttggtgaggggctgtgaggtaggagaatcgagggaagggaagagggctacggttcagggcaacacgacggcgacggacgagcaagcctcgatgagctcgacctcctgacgaccaccggtccctgacccatcgaacaccggtccctgcacgagcatctcctctaaatggccaagaagtcgatgaacccggcggacgcgcaccgtgagtcggccgctcgctctgctcaactcgcagccgaccggctgacgccctgcgtgtgtcgctcccaggcaaggcgcagagggcgaaggagctcaagcgggttcgtcgttatcgcatcaacatcgctgccatccctctgatgacctgataaggctaacctcgctcccaacgtgctgcaattcagaacaaggaggatcgaaagaagacgcgtgaggtggcgacgctgaagaaggacaccggaggtgggccgacaccggcagctcactcgagcggacgaggtcgtcgctctatgctgacccccagccgaccgccatcgcgccctcgccgctgcgtccgcaggacttgaggcccggatcagcaagcttgcggcgatcgctaagccgaccaaggcggacgaacaggagctcgcctcgctccgagccgagttcgagtacacgtccaagctcaagcgcgagtacgtcgagaagcaccccgagcaccgcaagttcgtctacgtccgggaagccgccgaagagaaagcgaagcaggagcgcgaggacaagggcgagggcccatcgaatggaggtggcggtcgcgcaggtggcggcggagggctctacgaccgggacggtcgactggtgagtgcgatctcgaggagtcgctctagtcccttacctttgcctaggcggacgctgacgatgtggttcgccccgtcggcactgccagcgtcgaccggagcgatcgatctactacgacccggtgctcaacccttatggagtgccaccgcccggcatgccgtaccgcgagcgacgtccgtaggctgcttggtcgcactcgccctgccagacgtcagctgacttgcgttgaacgcttctccatcagcgccgacaccagagcccttaccaaaggagctccagtcagagagcgagtcgggtgcgtccgttgtctgcctgacaccttcgcaacaccttttgagctgatgccttcctcccccccccccgcgcctcgatagagtcgtcctcggacgacgactcggacgacgagattgtcatgccgaccggcccgccacctggggcaggctcaggatcggagagtgataagggcgacgactcggactcggacgactcgatcgtcttcccctctgtcccgccaccgccaaaagcagcacctctgccgccattgctcctggggccaccaccatcatcgccagggatgtgtagcatgccgccgcccgaattcaacccgcatgtgccgccgccgggcttctacccaccgcagccgcacatgatgatgaatccggcgatgatggtgcctccgcagccggtcggcttctacggttggccgccgcttaacgtccacatcccgtaccagcctggaggcggccagcctgccttccaaggagggggtggccatcgtggtggccgtcaactgaacggccgccgacctcccggccctccagcaccgtcggctgtccatgctcggcccgcaggaccagctctcgcctcctcctcgtccctaccacctaaacccggggcatcgttgccggtcaatccgaccgcaaaggtcgcaggtcctcgtccgccgcctccgccgccagcggccgtctcggcgctcgacgccctggcgtcatcgacaagcgcagccgagcctgtcctccgcgactttaagaaggaagcggccgcctttgtccccgcggccgtcaagcgccggcacaaggaggaggccgcacgcgacgccaagcgtgtcaaggcagcgccagatgtcgacggcggcggctggggcgctccgctcaagggtttcgacgacgaccagtccgccggcgccgcctatgtgaccctggaagggtttgacgacccagcggctccgatgcaggctagtgcaccctcaacagccgtcccaaaagttgtccccaaagcgaccgggcccgtatccttcggcgcttcgaataatccgctcctcggcggcctcgcgagcgttctcggcaaggccggctttgtgccgcgaaccgcagcggctgccgctgcgcccaaggagaagaagccggatcgtgacggctacggcgccttcctctcgggcctagacgggcttgacaagtagtgggcacagtgagctcttgagatctgatgcgactgcctcttcatctgccccggcctcgtgctttgctcgcctcaacccgacccacgctctgcatgcgcttgctgccactgcacgactgctagtctcattacgatcagtccgcccctcctgggagtagttccgtctggcccggcacccagccggccagcacgtcactcgcctcgctgctatcgtctccctcctcagcgtcgacgtctggccgccagccgaggctgacgagctctgccctgcgcgccttctcctgcgcctctttgcggtcgagcagccggctcatgctcgtcgcccgcggcatgccgccggggtacacgccgcccttgcccgtcttgctctgcgggagctcggcaaagaagcggaagccagggacggccgcgccgatctgggcctggaccgacggctcatgcagcgcgacccgggcgacgggcgcgttgctcgacgggatggaaggctggccgtaatacgtctgctcgatcggaaagccgacctcggctcgccgtagggcggccgcatgcgagcggttggcgctgacgatgtcgcctgccgaagggggagaggtcgaggtgacgggcacgcgtcgagacgcaagggggttcaaggcgacggtaagcaacgccatctttacaattctacatcaaaccagaggcctcgttgcgagctcgttcttctctcgcgagcgagacgcagcgcctcgaccggagcgagcaggttggagccgcgaacgaggagccaggcaagctacgcaccctctttaccgaaacggtcgagatccttgaggaggaagaccttcatttgcttgggcttcgtcagccgctccgggttggcgatcgtaaggccgccgtccgagccggtaggggccgagcgtttccggttcgacttctgatggtcgaggcggcggtgacggcgacggcgggcatccgggtcagcatcctgcacctagcaaggggctcgttcagatctgacttaccatgcgcctggcgaccggcgcgagtaaacgagaggtcgaggccgagggtcgcggggacgcaaaaaggaacgacatctgggcggagctggtgaagaagaggtggtgaaggagagggttacgggaggccgaccgaggtcgatccaagcgtcggggagaggtcgagaggcgagctgggaggggaagcctgcagagacgcatcgtggcgatgcagggcagagaggtcgacttgaaggccggccttcgccgcacgggtggcgagacgaccatctcctcccagcctctcccgcccctcgacagccgttagccatgccctctttgacgcgcgcgacaagcggcctgcacgtttcgaccaagcacactgtcattgtcggcgccggcatcgtcggcgcagcgaccgcgtgcgtcagacgctctcaccgtccctccgacttgactcgtcgctccggctgaccgccttgtcgcctccatcgctgcagctactatctcgctcgccaccccctgttcgacccggcctcgcacaggattaccatcctcgaatcgtcggccccggccgccggcgcctcgggcaagtctggtggctttctcgctgccaactggcacgcgagcgagacggcctcgctcggcttgctgtcattccgcttgcacgccgagctcgccgccgagcatggtggcgccgagcgctggggctaccgccgagtcgacacgctcagcgtccaggccgacctgagctcaagcggctttgacgacgttgatgccaccggtgctggtcgagacgacgaccgggacacaatctgcggcggtgaccagccgcctccgccgacggcaggcggatcggccgccaagaaggcgctcgagccctggcttgcacgagaggtcacgtcgcggatgagtctgtccaagctcggcacgacggcgacgtgcgcgcaggtgacaccgggcctgctgacgacggccctgctcgagttgacgcccgaggctcgcgtcctcaaggcggcgccaacggagctcgtccgccgctcggcgaagggagagctcaccggggtccgctactcgggtgagggcatcgaggagggcgtctcgggcgagcttgagggtgtcaccgacgttgtgctcgccaacggaccttggctcggccggctcgcaatcgacctgctcggagccgagatcggtgacaagctcgacgtcgacggtcagaaggcgcactcggtcgtcttccgcatcgctgaggaggcgaggtcactcgtcacacctcgtgcgtctgccagccgctgattgtcgcaaagtcgcgcaaagtcggcctcgcatcgctgactccacccgcctgctctttgcgtggccctctcgcagacgccctcttcacgtcgctcacattcccttccggcgaggctgccgacccagaggtctacccgaggccagacgggaccgtttacctctgcggatcgacctcgtccgcgtttatgcccgaactcgcatccgaagttgagccggacgacaagccgatggccgagctcgtcacccacgcctcggccctcagcccgctcttcagcccgatcaagggcggctcaatcgagcgccgccaggcgtgcttcctgccatcggcctcgagaggtcgaccgctcgtcggcaaggtgcctggcgcggagggcgtctgggtcggcggcggccttagctgctggggcattacgctcggtgcgtcccatagctactgatccggcgttgcttcggcccccagccatttgacgaacctcctcctcgaccactctctgccactcgcaggacccggcacgggcaaactgcttgcagagggcatcctcgagggcaagatgcatagcgccgacattcgtcggcttgcgccctgaaatcggccgagaggatcaatgaacgagcgagaacctggggccaacacacgcgaattccacactcgccggtcgccgcatcctccaaccgcccgacaagactacaaaagctccgtcgtctgcgcgcgtttcttggccgtcacttctctggattgccggctagtccgaatcccaggcctggcgcaagacgtggccaaggagacgcgcccgagacgaaggatggcctacgcaccagcgactcggccctgccgccttagtcggtcccggaggcgcatactactgccacaatcgcatgtctctgctcggctcctgatctcgtcactgcaagggcgccctttgaccagggtcatcgcagtcatctgtgccacatgcagtcgtcacgctcttcggcttcggccgtcgcgcccgacgcggctcgcttcgccttgccgtccgagcggcgggaccatctcgaccgtcgtgtttctgtccctcactccctcaactctcatctctctctctctctcgatgtcagtcgctcgtcccgcttccatcgctcgcctcgcctctgccgccgtcgctcgtcctcacgccacctgccgccggtcccccgtcactctgccagcgctcgtttccgccgtcccacgccgccctttctcgacctccgccgccgccatgtcttctccctacaccgtcgtctcgacctcgagcgcgcctaaggccatcggaccgtactcgcaggcgatcaagcacgccggcctcgtctacacctcgggcgccatcggctttgacccggagacgatggacattgtcagcccgaacgcgatcgaggctcaggccgagcagatggtgaggtcctcctcctcctccgcatccggaccgtggcatctttcgaagcctttctgacgccgtgtcttcccctgcagttcaagaacctcggcgaggtcctcaaggcctcgggctcgtctccggccaaggtcgtcaagaccacgtgcgcctacttgccgtcgcttcccctcggctccagcccgcactgacctctccctcctcccccttttgcgctgaccagcgtcttcatcaagaacatggacgactttgtggccttcaacgccgtctacgcccgcttctttggcgagagcaagcccgcccggtcgaccgtcgaggtcgctcgcctgcccaaggacgcgctcgtggagatcgaggtgcgtcgccccatcctgacccgcacggaggaacgaactgacctgctcgcctgtctaccacctcggcactcagactatcgccatcaccgagtagagcgctcgtttcctcatctgctccatgagcgtggttcggaaggatttccatgtcacatagaatctcgaccagccgctcgaccgaaggcgtaggccgcgcgtcacagggcgaggctgaacgaccctcacgaagacaggaggtcgctgttcaaatcgtgcgctgaccgcggatcgatcagagcgcagcgccatttttcgacaagcgttacttgacgctggcgggtacgacgggcggcatctgacgacaaggtctgcgcgtcgcggaaactgaagggagggggagaacgagacagcggcgccgagacccctatcgccgccaagcgatccagccgacgaagcggccgccgtcgccccagccgccggggccggtgctgttcgataggcgacggatctcccagccgccgccgtctgcgagccaagccgccagccagtcgcggatgacatcctcggtcctgaactctgcgacaaagagcgtgacggtccggccgggctgagaataaaagttgagtgtcgccaggaggggctcgatcagactcgggtggtagaggacgtcggtcgcgataatcaggccagggaggctcgccgcatcggccggcggtcgaggccggtcgggcgacgagggaaggtaggtcgtccagtcgagttcctgaatcccaaccgccaacaacggatcgagcccattgagcttcaggttggcctcgatgagccgcagggcctcaggcagatctgaagccgtccagtgacggcagaagggtgcaagcacgactgcgagggcgcccgttccggaccctagctccagaacggtcgtctctcgtaggtgcttggccgaaaggagcggcgtggcagatgatggtgccgtcggatgcagcaagtgcgggagaacgtgctcgagcaggtgcaggcccgttcgccagacgacggaggccgtgtcgcccccggcgcccttgagccgccgcatgtcctggccgagctcgagctggacctcgaccagctgtgcagccttcggtcgtccagtcatgcgacccttacgcccgcttcgagaagcggccggcccaatgacagctgcttcgtcgagagacggcggcggcgggattgtcagcgtgaggctgagccgggcagtcgacgggtcgaccatgccgagcgacgagtggccggccgcaatagttgtcgacgtcggccggaggcccaacgttgtgtagagatcgaacgtcttggccgcaggacagttcaaagtcagctctggcagagcgagggagggcaggacgggcgcacctcctcgtcagcgtcctcgacaactgtcgtgccgggcggcaggcagagcacgcgcccagggcagaccgccgccagacctccgccgccgtcagtcgtctccagcggcatatggaatgcgagctcagcctagatgacctcggacgagatcatggacaggccggtaggagaggcttgaggacggggtcaccgtctacgagacgcgtctgcgcccctccgacgcgcctctggcgacctcgcgtcgagcggtggtcgccttcgcctgccctcgctccctcacccgacctaccctaccctccaggctgcccctccctcgcaagcctcccatagtagcgatgcaggtcgacgtattcatctcggacgccgacgctgaaggcgagagcgacgacgacatcccgctcggctcgattccggccgcgttgctgccgccggcgctcgcctcctcaccgtcgtctcgctgggcgccgttcgtcgcgtcctcggccggcccagccgatccatcatctctggcaacagccgatgccaactcgctctcgcacactggtggagatgcagcgaatccgacagcgcctgatggctggccgacggccaacgtgtcagaagccccggccaaggtcagctcgtccagcctgggatgaagcacagagagcccgtgctgacagcgccatctgttacctttgccgctccattaggacaacgaactcgctggcgaccggaccatgtcagacgaccctctcgacctggctcccatcccgtctgacgctcggcggaccccttcgccgtcgcccgaccctgtcagcctcggtcctaatgccccctcgagctcacgagcgcgacgcgaccggccgccggtcgactactcgctcaagcttctcttgcctcccgcacaaccgtctcgtctgagtgcggccgacaaggggaagggtcgggcgtcgacgagcatggcccgcgacgtgctcaagcgaagcgggccgagcaacaagcggaagagcaagaagagctcgagcgggtcgatcatcaagcccaagagtaccgagccgcctgatccagagtgcggcttctgtggctcggtcgagaacccgtgcgttgtcctttctagcctctccagcgaccgtcgtcggcactggctttgctcgttgagctttgcaaccgaagagcgagctcgtgctgacgccgccgcccacccaggaccgccatccggtcgtgctactcttgcagccggtctggtcacgactactgcatgcagctcgagggcgtcgtccaagaacgaatccaaacctaccagtggcaatgccttgagtgcaagcaatgcgagatctgcggccagccggaggacgtcgatgtcagtcagccgtcgtctgcccgaccatgctgctgcgccgcgaccggttgagagtcgagagctgaccgtctgcttgcctttgcacgtgcccgctcagccggaacgcctcctcttctgcgatcagtgcgaccggggctaccacattgactgcctgagtccagtgagtcgagaacctgtctgcggtcgcgcttgctctgccgcgctgaccacgcgcaaaccacaatcagcccttggaccagcctccggcaggtgcgttccgacgcaaccttgcccaactggagtcgttttcaggcactgacccgccttttcttgacaggagcatggtcctgcaagctctgcgacgacacccctccgagtccatcgtcggtggcgacctctgccgcgtccaaaggcgagacgccgccccgcccgccctccaagcgtgcgcgtccaaccgactacggcttcgacaaccagcccgacttcaacgacgcctcggcttccgactctgagactgggccgatccgcaaggttacccgtcgcgtcaacggcacagagtcggaaccctccggcaaacgtcggagcacgggcggcaacaagctgttttccagcgttgtcaagctgaacggcgtgcgcgtgaagtcgaccgcggcccaacgcgcggcgatggtcaagaccaaatcccgcaggggctcagacggcgagtcggagaaggacgaaaaggaggatgtcgaggacgagggggagcaggtgccttttggcggtctaatcgacggtccactggccgagacgacacggtcacagctcgccgaagtcgaccgacgcttctttgcggagacggccgcgcaggccacctacgaggtacgccgctcgaggccgagccatgtgcttgtcgagcgggcgactgacaatgctccggcactgcttcctcacccctgcagatcgccgaggacagcattcttcgcgacgaatcgcccttcccaacgagtcccggccgtcggcgacaagacgacgacgacagcgacggcgactatgatccactcggtctgaaggcctctgtcgagaccggccgaacagccaagcgtcaggcgacgaagagactgccgtccgctctcggacacgatcagtcagaaggagcgtcctcgacgagcctcgtggcacagcctttggcggcccgaccaaagctcgagaagatcaaaacgatcgccttcggcaagtatcagatcgacacttggtactcggcgccgtacccggccgagtactcgctcgttccggatggcacgctctggatgtgcgagttctgtcttcgctacatgaaggacgagcgcgtcgccctcggccacagcgtgagtcggccagaccaccacatctccgctggtgaccaaactgacgccgacgcaatctcttccaggtcaaatgcaagtcgcagacgcctcctggggaggaagtctaccggctcggtaacatctcggtctttgaggtcgatggccggaagaacaaggtgcggcctcgccaaaggcgggaaacgccacacgccccgaaactgacgagctgctcccatctgtctcagatctactgccagaatctctgcctgctcgccaagatgttcctcgaccacaagacgctctactacgacgtcgaaccgttcctcttctacatcatgaccgagcgcgacgacgacggctgccactttgtcggctacttttcaaaggaaaagaagagcccactgcactacaacgtcagctgcatcatgacgctccccgtccggatgcgcaagggctggggcaacctcctcatcgacttcagtacgtcccttccaaagtcgcccgagtgcctgccgcgctgaccagagccttccttctgataggctatttgctttcgaaaaaggagggccgtgtcggatcgcccgagaagccgctctctgacctcggcctgctcagctacaccacttactggacggcgcaagtcttcaagtacctgctctcatgcgagctgccagtctcgatcaagagtacgtcatcgccccttggttgcttgactggagtcaagggtaacgctgacaccctgccgaccacctctcgcagggatcagccggacgacgtcgctcatgcccgaggatatcctttttgtcctccgcaagtacggcatgatcaccatttttgacccggtccagtcgcaggaacggccctcggcttcggcacatccctcctcgacggtcgtccacagcctcggtcatgcgccgctcatgcccgaggccgacaaggtcgacaaggcgatgcagatcccttatagctacgaggtcacgcccgactacgtcgtcattgaccagtacctcgccaagctcgaggcaaaaggctggctcaagctcgatccgaagcagctcaactggtcgccctacatcctcaataggtccggcgtcctcaagaagaagagcgagcggtcggaaggaaccgatatcgtcccggacgccggcgctgagccgtcgtcgtcaacggaggctgaggctgcccacgtcgcaccggccgctctcgctccgatcgtcgccggcgtcgcagcggagcagcacacggtcacctcgctcgccaacgcgaccaacccggccttccaatcggcgcacgcagacaatttggaggagatcgagatcggggccggaccaaatgcgtcactgccggttgctgtcgtcgatgatggctccgccgacgcgatcgagtcagcgacggtggcagagtctttagccgtcgaaccaccgacgacggtcgtcaacccttcaacgcgcaccggctcgccttcgccaaagaagcggatccgcgtcatcctctctcctgtcaagcccgccgagtcgacgccggtgcggaaacgtcgcaaggctgacacggcgacggcggtcgaagacgaggagcggcgacggctcgaggaggagaaggcatcgctcgcgctcatccacgacctcgcgcgagccgaccggggcctccggtctccagcgacgccttcgccaaaacttgcccgagcgacccggacgccgctcgccagtgcccgtccttccgcaacgctcgggtccgctgccagtcacgcacgctcgacccgcggctcagcaaggtcggtcgacttggtcgcttccgagccgcaagaccggccacctccgcttccaaacttcgtccgcgtcgtccacgacaactgaggcggcccttggggcatcgactgcgatcgatgctgcctcttcctgcccctacgcacgctcacgtcctcggacagaccataagattagagataaagcgcgccagccgactgcagatcccgttccccctctcactccttcattgactggcgacagtcatctgcagtgaggccaagaggataatcagtgagcgagcgctgaacacgcttagtcggttcgagcacgcaccgccgcgatgacgagctccttgtccgattcggagtcgaggtaggcgagccagacgtcggctccgacgtccgggatgccaaacgagtggaggacctgcgtctcctcgtaggcgtcggaaaagtttgggttggccgttgccgggagcgaaattgtcgcgacgggcttgtcggtgctctgaggaatttgagagcgaggtcagtgggtgggtgagaaggcagccaactcctccgtcgctcactcacgttcgagtccttgtaaaggtggatcgcccggggcaggatgtggaaccagcgtcgccggaagacgaccgtgttgggcgcctggaccgtaagccactgcagaggggatcgaagacgtcgtcagctgccggcactgagcatctgcaaatcaaggtgacgaggacgcaccccgtcggcgagcctgccacccggtccagcgttagcaggcggcgcgcttccctccctcgcctgctcacggagccgcttcgcctcttcggcctgttcgcgttcccggcgctccctctcctccttcgccgcccgctcacgctcgacttcgcgcgtccgctccctcgcggcccgaagccgctcctcctcacggacgacccgctcggccgcctcgcgttctgctgcgagctcgcggaggcgcttacgctcgcgtgcttcggcctcgacccggacgcggacagcctcgcgttcggcccggcgggcgtcgagcgcctcccagggatcgactgctgctgcattggccgcccgacggctcgcaaccgagtcggggaggagggcgttgtcgccctcccgtcggtcatcctcgcgcaactggagccagtgggccgacgtctgcggttcgtcgacgcccatgcctggcaggcttggccgcttacggtggaggactgactcgcgcggcgcagcaggagcgctcgcgggcggatggccgttggccaccgatcggtcgtaaggagcagctggcgctggctctaccgccgtggcagatgcggccgtgacggctccagccgagagcggcgacgacgcgtggacaggtgaagcaaacgatgccgcgttcgctggcatcggcggtgagccggctgcgtcaaaggtgattggccggggctcacggcctggccggccaaacgtcgagctcgagacgcgtcgctggagatcaccgttgacggactcgtcggctgcgattgctgcgagcgagctcgccgagatagaggtcgacgtcgacggcgcgaggaccttgccgagcacgagtgggtcgacgccgggcgctgcagcctccatcgtggccgggccgaccgctgtccgaggcggcgagatcgagtagccatagccgtcgtcgtacgccgcctcccagtccttgctccagacagtgttggaccgagcccgcccaccagcgccggatcccatcgtcgcctcggggctgtccggcccgccgtcgatcatcatcgagctggcgaaggaggggccgctgtcgatgccgatcggagagaggtcgaccgtccggacggcgagcggttcgttgagctcgtgcggccgctggtaagaagcggatggagctgacggagcgtctttgggcggcagggctggcgggccgacctgctccgccggctggacgacgccgttcttgcctgcaccagtcttggttcgcgagccaaaacgctccctgagcgagccaaacgacgtgatgcgacccttggaagctgaaccatcgccgttggcggcggtcgggccagttggcggccgccgggccgagagcgagagagacgaaaagagcgggatcgacggccggccgatgccgccaggagagcgcggcggaggcgtgccactctgctgagtgctcggcagagcgggggacgcgggcggcgaggcggtcgttgatgctcggctcccttcgagctgggcgaggcgcgagattgggttcgaggacgagtagtctccggttgaagtcggcctgtcaaattcgtccttggacggcagcggaggcgagacatcgcgagacagatgacttccggtcgttgcagctgacaacgacggtgaagcgtacgatgtgctgcccaactgcgttgcctcacgcggctggctaacgctgcttgacgcgtcgccgtttgcctcgcgagccgccgtcgccgccgccgccggcgaggcgctggatgtctgctgctgctgagccccaaagccggcgccgtgcgagtgcccgaccggcggcgtgtagacgtttcgcgtcgtctgcgagggcgagggcgacgtcgcgctgatgacgggcgtcgacgactcgggtgttcgtgggcacggcgagggcgaggcgtccgatcggctgtcggttcggaccgggaggggtcggacagtcgagggtgcgcttgatggaggagggctcggcaaaatgcgccgttgctgctgctgctgctgctgcgactgctgggccggggacgacggtgtcccgctcggagagggagccggtacgtcgagctctgcttgtagccggtcagacgtcagttcgtccgacgaggtgatggtgatggcgccgccgttcggctgtgaggcagcggacgccaaggcgcgggtcaggctttcgctacgaccgacgggtgacaaggtcaaggagagacgcaccgtgaaaaggttcgaggataggagccggccatgtacggttgcacgggctgcggcgagcatgaccaagatcaaggggtcaggaccacaggcagcggcggaaggaatcaacgacagaccacgccgcacctcgcttgacgccgctgagaagtcaggagcaatcgcagccgtcggccatcagcttaggatgcaacgttgaaggggagcgatgcgagcgactgacccaacgccctcgccgaggtaagtgacgacgcccgtcttctggccgtcacggacaaagccgtaggcgacgtcctcggcgaccgtgtcgaacgcggtccggcacgcgcccaggtcggcggcggagccggttccgaggaggacgagcttgtcgcgctgggccgagtaaccgaggacgagcctggatagtgaggcaagaaggcgccgttcagcatcagtcggcccatgcaggacgcgccgccggaggcaggaggctagtcgggcgtaagggcgggccggagggaaggggctgcgctcggcactcgctcggtcgggacgtaccagtcggtcgtctggtggtggaaggcgtcgacggcggccccgatgtcggcagacgagtagtcgacgctcatcccgtcactcttgctcgctgggaggggtgtgtgctggctcggaggagggcgacggagggatactggctgttggctgctgatggcgcccggcctgcagggctaagacagcgtacgcgatcgaggtcgccatggcgacggtacggcttctctgccgatttgctgcaaacgcgtcccgctggctctgcgcgtgcctcggcgggcccaggcggaagcctcctcgcgcgcagacttccttccgtcgtccttactcccacaacccaccctctcccttccctccctccctcactccccactccctctttctccctccccctcttcgcatgtctgacgtcaacgatatctctgacaagctcggtccgtcctatccctgccctctgccggcgccctcgtctgctgtgagagaaagacgagaaaaagggtcgtgtgggctgacccctcacatccaccaccactttctgccctcttgtcagctgcgactggcctcaatccgagccgtccggcctacgtgcccccgcacatgcggggcgcggctgccgccgcccgccctgttgcccctccggcttcggtcgctccgtgagttgaagacctctctctcatgccctctcggtaggctccgagcctgtgacgagcggcctgtttgccaccccaggcccggcccccacactcatttcctccaccgacccgtttcaccgctgacctttccttctctcccctacagcccatcatccaacgcttccaacggcggcggcaactggggcgctgctccccatccctccaacggtggtggcttccctgccgcccgcgctccggccacaggccgcggcggcgactggggcgcgccctcgtccggcggcggaggctactcgtccggcggccgtcccggccagggcgagggcatgtggaaggacggcaagcatgtccctggcgcgcgcaacatccggctcgagaaagagctcttcggcgaggccaacgacactgtctcgcaggtgcgtccttcgctttatcttgtgcctctccggcggcctgcccgagattttgcctccgacacatccataactttgttccctcccttccagcacaccggcatcaacttcgacaagtacgagtcgattccggttgaggcgaccggctccaacgtccccgagcccgttaccgtcttctcgcccgacgacctcgatccggtcctgctcgagaacattgtctcgtcgcgctacacgacgccgacgcccgtccagaaatactcgatccccatcgtcgccggcggtcgcgacttgatggcctgtgcccagactggttccggcaagactggaggcttcctcttccccgtcctttcggcctcgttcgccaacggccccgccccggaccccgtctcggccgacaacggctcgtactcgtcctattcgcgcggccgcaaggcctacccgaccgtcctcatccttgccccgacgcgcgagctcgtctcgcagattcacgacgaggcccgcaagtttgcctaccggtcgtgggtcaagccggccgtcgtctacggcggcgcggacattggccagcagctccggcagattgagcgcggctgcgacctcctctcggcgacgcccggccggctcgtcgacctgattgagcgcggccgcatctcgctcgccaaggtcaaatttctcgtcctcgacgaggctgaccgcatgctcgacatgggcttcgagcctcaaatccgccggatcgtccagcagtcagacatgcccggcgtcgaggcccggcagacgctcatgttctcggccaccttcccgcgcgagatccagtggctcgcccgcgatttccttaaggagtacatcttcctcatggttggccgcgttggctcgacctcggagaacatcacccagcggattgagtacgtcgaggaccgcgacaagcagtctgtcttgctcgacctgctcgcggccgaggacccggcgaccgtcggcctcacgctcgtctttaccgagacgaagcggatggccgacatgctctgcgacttcctctacggcaactcgcacatggccacctcgatccacggcgaccggacccagcgcgagcgcgagatggccctggcgaccttcaagtcgggccggacgccgatcctcgtcgcgaccgccgtcgctgcccggggacttgacatccccaacgtcatgcacgtcatctcgtatgacctgcccaaggacgtcgacgactacgtccaccggattggtcgtaccggccgtgccggaaacaccggcaccgccaccgccttcttcaaccgcggcaacaaggtgagtcgtctcgggttctgacgtccggcagtttgccagtcgctgaccgaccttcccttccttccctgtatctctacagaacattgcccgcgagctgattgagctcctccgcgaggccaaccaggagatccctgactggctcggcgagatttcgagcgagtcgtcgttcggcggcggaggctaccgcggcgccggtggaggccgcagcggaggaggcggaggtcgccccgccggccggactgccgtcaaggacgtccgctcgggtggctacggcgccgctccgcctcgcatgagccagggcgccggctacggcggtgcgccgatcggcgctcgtccttcgggcggatgcgcgtgggatttctgatacggctcgacggcggccgcgacagccttccctgatggtcctttgtatgtcctctgtctccccatacccctttcttcctttttttctatgaggtgacagctcgctgacctctcggctgcccccctttgggcccccatcagactattcgttgtcccccctctctcacccttcccccttaccctctgccgacttgtctattctctttctctctctccaaagtcgaggcccagctgccggccctctcgcggctttccgacctgcccggccaagaggctctcctcgtcttgcgtcactgcttggcgagcaacctccgtcatctgcagcgctcccttcggacggacgacctgcctggcgcgtgggaccagctcgacgaggccctgctcgagcgctttcacatcctccggtcgtcgcctcgccgcctcgtatcggacgccggtcttgtgtctctgcccgctcggctcggcggcatgggcctcctctcgcacgccgaggtctcgccccacgctcgagctgccatggccgagtccgccgacgcccagctcaaggtcgcctttgccaatgccgacgatcttgccgaggtcgaggacgatgtcgtccagccgacgtcgcagcgggcccggtgccagacggccttcgtcaagcgtcgcgagtccctcctggccgccctgccctcgactgaccgagctgtcgtcctcgacaacgcctcgcccatcgcccggcgctggatgtcggccatcccgttcgctgccaacctgcgtctgacgtcggccgaggtcgccgctggcctgtcgattcgcacgctctgccccggccaggacgaccactgctcgcattgctcgctgcccaacgtcgtcggccatgacgacatctgctcggcccgtcccctctggcgtgttgctcgccacgagcacgtcaaaggcctgctctcgcgtcatctcggctccatcccccgcactcgcgtcgcgctcgagcctttcgtccctggctctcaccagcgcacggacttgcgcgtgaccggccctggctcgttcggcggtcctgtctccgagtacgacgttgccgtcgtgtctgcggcgaccctcgctggccgtgatccgattgcctctgccgacgtcgccggccttccgtcgtcgctgctgcctgctggtgtgtctgccgacgctgcgccgcgtactgcttgcgcctctggttctctcctcaaccaactcacttcaaccgagaaccagaagcgctcgaagtacgacggccggacgtcgtctcccttccacccgatcgtcatctcgaccggtggaactctttctccttcgactgttgccctctttgctcactggcggggccttatgccccgctatggtctcttctctcgcctcctctcgctctctctgctccgtgcccgtgctcgcttcttcgccttttaggcgaagccccttagccacttgaactccttctcgcctccaatgtaccaccgtccatagcgcctctgaccctctgctcccatcgcatgccccgttacaccctaaccccgacctgtacgttctctcgccggatgacggtgcctttgacgacgtccagacgttcttcgacggccgcggctcgtgcctcgagctgaacatcaccaagtccaagtcgcacgccctcgaggacatccggtcgaacggtctcgacatccttggcacggcggtcggcagctcggcgtttcggtcggcgttccttcgtgacaagatcaagcaccaggtcggcctccttcaccagctcggcgacctcaaagcccagcatgccctgctcttgcttcggttctgcatccagcaggaccttcggcatctgcagcggacgctcaagacggaggaccttcctggctgctgggacgatctcgacggcgctctcctcgactcggctcttctcatccggtcttcgcctcgacgcctcgcaacggacgccgacctcgttactctgccggcccgactcggcggtctcggtgtcctctcgcacacagagtgcgcgcctctcgcgtacaaggccagctctgacgcagccgacgccgctctcgctccggtccttctgcttgatgtcgacgacgaccgacccctcgtcacccagcgcatgcgatgcgacaaggccttcaacgcccgactcgagcgcaccgtccgacggctgcccggcctagctcgtgacaccatctccgagtcggccaccgtcctcggtcgtcgctggctcggtgtcgtgccttttcgatccagtctcgagctgtcggacgctgacgtcgcctcgggccttcactaccgcacgctttgctctggcccactcgacttctgtgtcgactgtggcgaggcctctccgttcggccacgacgaggcttgcaccggccgcgctccggtcacgctcggtcgacacgaacaggtcaagcgtctcgttcacaacaccctcttatcttgctcacgctaccgtgttgttctcgagccgctcgtgcccggcacccagcttcggaccgatctccgcatcaccggccccgacggcgtcaaggagctcgacatcaccgtcgtttcgcttgcctcacaagacgctcgctcgctctcgacccaggcgcactcggacacctcgctctccgtcgtcgaccggtctcgcaacgctgtcaaggacgccctctcggccgcagctcacgccaagacgctcaagtacgcccgccgggtgtctgctcccttccggccttttgtccttagctctggcggtgcggtcgagtccggcggcctgaagctacttgacggctggcgcgagtccctcgctccttcgacctactcgcactttgtccgggtgctctcgctcatcctcatcaaggctcggtcgcgactggcccggctctagtgcgcctctccggcttccgctccgcggcgccgcccgctttcgcctgtttcattttcccttctcctcattggctcctctctgttccgcctctcttccgctccgtctaccttcacctccgcctccgtgtgcccgcttccctctttcgtagctagtccctccgcctctgtcttccccctctcgacgaccccccttctccgttcactctacccctaagcagccgacccgaccctaccccgttcgtctctgtcatcgctccgactctccttgacattaggttacagttttatatgctgcagtcaccctaaacgacaccaaagtctcatggtgtaacggttatcacttaagtctaacatcccgttggatcacttacgaccccagttcgactctgggtgagactatgttttttgcctgttgcacggcggatgagttccctcacgccatgaggagactttatcatgtctgtactcttttcagcgcaagcctccttcgtagatagtgaggcggtgacagctgtcgggggcgcagctgaccaggtcaaacagcttcgattggtagcaaagcctttgccagtatacctctgagcgcagactgcctgttgtgagtcgcgaaagagtgatggttgagtaggaaagcaaagctgacggccgtgagcagactgcctggacgcctctgcctgcctgtcctgcctgttgcagccccttgcctccgccgcaattcacaacaacaattagttttcttgtttttggccataaattcgtcggtcgctgtagctcaattggtggagcgtacgactgaagatcgtaaggtcacctgttcgattcaggtcagcgacacattgttttgcccatcttccaggcagcctctcttttgcccctcttctcgctcttgcttcatgtttgatgctgctcttccttgccaagagcaacgatagttctgcttttgaggacttgagctcccttcgacctgcgctcgcttgcggagctgacgacgggctgcgcgcgggtcatcgcaagcgtcggcggcagccgtcccctcccctgttaccttcacggccttcctccgtcgccttcagctcgccgctttcctcggcagctcgtttaatcggccatgtacgtctgctcagccctcgagaagtccctgcccttcctcggcgacccgcctgtcgtcgccggatgccgctccggcgactcacaagcccgggcgagatggcgaacggccccttcctcccctcactcgctctgactatccttccctcgactcgccctaggttcaacgctccccgcgtcaacagaggctcctcctcgctctatcaaccgcagacttcgtcgtctggcgccttcggcggcggcggccagacctcgcccaaccttgccagcacatggaaccctctctccttcgagcccgatccgtggtcgtctgctgcccctccagcatcgccggcccttactaccccacctccaatctcctcagccttcagcagcgacggcggaggcaactctacaagcgcagccgcgtctggaaacctcgtcgatgaggacgccttgccgggcatctaccttctcgcgctcgaggctgccgacccggtcgcccgaggcgaggccggcgttggcgtgacggcgctcgggcgcgtcatccggacgagtggtctccctgctggcgatatcgagcgggtgcgttctcatgagctggaggcggtcttctagacacgggctaaccagccatgccggccgccgcagatcgtcaacgccgtcagtggaaacgcgccgaaggtcacccggcacgagttcttcctctcgcttgtcctcgtcggtctcgtgcaagagggcagcagcggtgagtgtcggccaacccaaggacagacattcatccgctgacgccttaccaacctcctgctcggcctgccagacgtctcgcgcgaggcggccctgagccgacactctgaccctccgacgccgtctctcaacctcgacagcctgcaggcgagccgatcggccattcggccgcctgtctcgtcctacacctcgtccagcacggttgcacaacatgttccgccgccgcctccagtatcctcgactatgacggacccatggacgacctcgccgacgatgccgactgcagccctaggtcaggctggccatacctcatcaacgacgcagcacgcccgccgacgctcgctcgatcaaagcactgctggcggccatccgctcgcgcacggtttgctcgcgatcccgcagtggtgggataaggagccgcgagcgtccgttcggctcgtgccgcagaaggagggtcgttggccgggcctcaagtggacagtgtacgaggtcgtcgtcaagagcggcgctggtcagcaggatgggtccggcgtccatcgacggtactccgagttcgcctggctctcagactgcctcgtgaaacgcgtgcgtgggcacgcgataacccctttgggcgcgcctgaagctgatcccgccaacccaactcacagtacccgttccgctgcatcgtcggcctgcccccgaaacggctcggtgccgacccgagctttctcgagcagcgccggcgagcgcttagccgcttcttgcagcacgtcgttggtcacccagtcctccgggccgatcatctcgtccaggccttcctgacggagccgaacctcgaggtctggcgcaagggcaaggtgagggccgatgctgctattttctttctatggaaaactgacggacactggcaacctgttcttcgcagggctccaaggtcaacctcgacgaggagcgcaagggtggcaagctatcgcagcgtgaggagctcgaggtgccaactgacttgcacgagaagctcgcgtacgtcccttcgctctgcctcactggccgaaacggtaggctaagtaagacgctgctctcaccagcatcgcacgacggatcctcggccagcgcattgcctcgtggtcgtcactcacgcagatctttgagcgacacgcgcgccgactcgaggcgctctcggctgatgcgtctcggttcgccaacgcgctttcgtcgctcgccgaggccgaggagagctggaaggcgccgacgcggggtacaaaggtcggcggcaacggctgggtcggggctggcgaggacgagagcgtggtcgagcgggacgagctcggcgaaggtgtccgcaaggggctcgggcaggctagcctcagctgggatcagctcgccgtcgacgccgagggcagggtgagggtcattctgttgtcatcttcccttgcgacgtacctgaccgagcagcgtaacagtcccagcagatgatcctcggcacacttgaggctttcaaggcgcaccgtgaccttctcctcggcttccgcgagacctttgcccgcttcgaccgtacgttcagcagcctgcgcgggcaatctcaccgagctgatcccgcctcttatcgccaggcctctctccggaccctgtcgagaagctcgagaaaaaggtggctacgacgcagaacaaggtcgaggtcgttcggaaggccaagaagcccggctttgaggccgaggtcgaccggctcgtcgggacaattgaggcagaccagactgccatcgagggctggctcgcgagacgtggtgtcatccaggcaatgtgcggcattatctcaaaccaaggagatgactgcgtcactgacgcgttttcgtttctccgtcctgcagcctgtggcacgaactctctggcgtcgtctaccctcgcgagcatgcgctcgtcacgctcgccttccagcgcttcgccaaggaggaggccgtctactcgggcggcgtgcttgacatctggcgcgggctcgaggaggctctcgaggacatgccgctcgagtaggggctgcctctcgccagacgttctgaagcagcagtctcccatgtaatcatggctcccaacatcttagcacgttatcgttacccctgcctttggcccgcatcaaccctcgtcgctcgcgcaccgaccgcactcacttgcgctggcccatctcaagctcacccgggccgaagctcattggcaggagctcgtcgagcgtcatcgtttttgtgctgccctccttgtcggtggccgacccggtcgagctgtagtcgcccgccttgtaagtggccgagacaatgacgattggcgtctgcgcgaaagcgagggacgactcggtcagttcctgcgcccacagcgatgcgaggtgaaacgcacgctcggtccgcagaactcccggatgaactgccggcagattccgcagggcgaggtcacgggctgctcgacgtctctggaggcaagacaagcgtgcgagagggcgagtgagcaaatgatcgccggcagcgcagaggagagaaatgacggacgacgagacagcgatggcaatgaacttgcgcttgttctccgagacggccttgacgagagccgtccgctcggcgcagatcgtccctcctgtcgagcccgggcgagagaggtcaggtcagagggagacagaccttcgggcgagacctgcgcggctcgtccgccgacgcgagctgaggctgcagacgagggacagtcacgcaccgaacgaggcattctcaatattggcgcccttgatgatctcgcccgaaggcagcaggagagccgcgccgactcggaagtgcgagtagggcgagtaggatcccttgcgagctgtgtcgagggggaaagggcgaccaggcagggtcgggcgtcagtccggcgagggtcggcgaacgccggatgagcaggatggcgacgaaccgtcgagcgaggcctggatgagcgactcgtactgctcggtgctgatcgatgcggacatggttgtgctagttggtgaagaagaagagaggttgaggcgttgcaacgaagatggtcgttcggagagacgaacgagcaggacgacgccgggcccggcacgagctttcgctgccggccgtccgacgtcgctgtcgctgccatcgcacctcgcaacgtcgacccgagcaattagcgcgatcacagcatgcaggccagctcttcctaccatacgccaggtctcgcgggcttcggcatcgccttctcgcccttcattccaagtgaggctttcatttgacggcgtgcgagctagaccttctgctccggctgcgctctcctgtcgcgttcatctctgacggctgacctgtcccttgctgttgctgctcgactttcgcccagaccggatcgccctcgcctcctctagtcggtagcagtcgcactgcccttgatcctccgccgccttcgccggctgacctctccctctcctgttggtcccgccgcccgcgcagccaacttcggcctcgtcggcaacggtcgcgtctcggtcctctcagatctcgggccttcgcaggggatccggcccgagcagcagtgcgatcttcaacttgtcttggggcatcagcatgcatatcgctgagctgcacgatctcgcaggttcgagacgagagatgccgtgcacgcggtcgcctggtcggagctcaacccaaatcaggtcgcttcgggtggcggcgacggctccgtcaagctgtgggacatgacactgcccgttcgtcatctcccttctcagctcatgtggcgctctcggctgaccgtctgtccggcacttgacttgccccgagaccagaatcagcccgtcgcgcattggctcgagcacaagcgggaggtcatgagcgtcgactggagtagtctacgtaaggagcagtttgtcagctcctcctgggatgggtcacttaagctggtcagccccgtaaggcttgagtctgaagcgcacgaacctagctgacctttgcgcttctcctgcagtggtcgccagagcgcaaagagagcctcgccacgatcgccgcacgtctgtctcccaaactacctggcacgcgtcagagtcatctgctacagaactgacgtaaacgctttcgctcgttgttcctcagacgacgcctgcgtgtattcaacttcgttctcgccacacgtacccttcctcgttggctcatgctcgggctccggccactttgtcctgcacgacacccgtctcccggccggctcgcccgcccaaattcgcttcgcgcccttctcaagtgggatcgaagccctctcgtttgacttcaacaagtatgaccagggtgtcatcgccctcgccgggacggacaagacgatccgcgtctgcgaccttcgccagggggggcgcgagtcgttaagagcggtcggtcacgcgttcccggcgcgggccgtcaagtggagtccttggaagcggagcgtctttgccagtgcagggtacgacatgacgtgcagggcgtgcgtcgcgacttcgtgtcgccgtctcgtaagaaattgccagcttacggcttacctcctccctcccttctgattaccgcgctcagatggtcgactgcgagcggcgcaggagcgacacaaatcgcccagcacgccaagcacaccgagttcgtctgtggctgtacgtctctccgatgccgctcagggctcccggacggttcgaatactgacccacgaccccgcaccagtggcctggtccttattcaggtgcgtctagctgctcagctcaccatgaacttgcatgctgaccccctcttcgtttccttgactaccagcgaggggctcctgatgagctgcggctgggatgggatggtgcacgcctggcagtcgcctgtctgagatggctgctccgtctttggccgcctagcgagtcgccgccgcctcgaggtaaaaaaagcagtcaccgtgaatcgaaaggcgttcacgaagcgtagctggctggaaggagggctcagagcaaaccggcggcgccctttgcgccctccatctggcgcatgacctcctcttcgtcgaggaggcccaggcccgcgtcgtcctcgttgtcctcggccccctcggcctcttccgctgccgacccttcctctcctcctcctcctccccccgccccatcgccgtccccttcggcatcatcgagccctttgccgcccatacgacggaggagatcgtcgagccggagcggactcccgttgagtgacatgacaatgctctcgttccgccgcggcttgcggtagccggccgccgacgacttgaggagcggcgtcgagggcaggagtgggtggaactggaacgttgacgctgtcggcaccgtcgagggggccgcggtcgagcacgcgacagttgagaccgactcgggtggcacgacatgcttcttcttccggcccggagcagctgctcggggtgtcttgaggctagcgctcgtagcagaggaggaggacgaaattgtccgggctgagagaaagaatgcagacacgacggctgtcagcagacgaaggatgcgactacgacgggcctgatgacgcacggttcttgactgcccggcgttcagtcgactcatctgtactggccgtggcggtgcgcttcctacggtggaagggccagacaggtcaacaaccagagctaatcacaggcggcgtagctctgctggcttcagtcctgtcagcccaccgacgcacctcttggccgccgccccttcgcgcatctcgagctcgagggcgcccgccgcctgctcgtccggcttcttgccgagcttgacctccgccaggcgctgcatgacgccccggagtccgtcggcctgccactgctcgccgagctcgcggaccatcagccggcggagggcgagcgggatccgggcgagctcggccgcctggcgagcgaggaagagcgacatcttagcgtcgtgcgcctggtcgagccgggcgagctggtcggccactgcgggtatggagggagattccaggcgtcaatatccagcagagagacctgttggttcaaagccttgtctcgccagacggcggtgtctatggtcgaggagagagggactgacggccgaggtcaaacatctcgaggacggcctccttctcctggcgcgtcctccgacgggcgcgtgactgattcttggcctccacggcgcgcggggtcgccatcgggtccatatgggcaggcggcatggctgtcgggtggcttgcttcgagtgggaggcggtgttgattgaggtgacgggtaagaggacaggcgcgtcgtcgcgctcgggcccgtcggttccgcctccgaatcgtcgttgctcccgaaggtcgcctgcttcggagagacgaccagctgcacgcagacgaccgctactaacgacctcagccatccggtgttatctacaaggttaaacaggtctgttcgctcgctcgcttgatcgacgtgcggagatgcgagtcaagtgcgcggcactctgtcggagcgatccccagtggtgtcgttcatcgccgacgcccggccttgctcgcaccgagctcgcccgacatggaactcgcctacgagcccgtctcgtcaagacagtaaggaggggctgctgtggatgagacgttgaggcgtctgtgtgctcagactcgccccgccacctgcggtccaacgctgaccatcactccctctctacggtcgtcacctcggcagactcccgagcccccttctctcggccgtcgtcctgcgcagctcggattccagaccacacgactctcatcaccgtacactcatctgtcaaccatgggtagcgccgtctccgtcatcaccggtatcggcatgggtgcgtctgacgagagtgcctgcagcgcgaccaggcggagcgcagtctaccggtcagccagggactgacaagccccaacctctcgctcgtcagccatcggcccgccttgcatctatctcggccaggtcatctctatccggcgcaaaaaggactcggaagggttctcgcccgacgtctgcgctgtcctgctgatcgccaacgtctgccgctgcgtcttctggctaggtgcggatcagacctcgtcctgctacaaggttttcaattctggcgcggacccctgacgtcgcactgatgatcgacaggcaaacgcttcgagttccgtaagtccacgctgccttccagctcgtggtcattcgacactcacacgaccccgccacccgccctggttcagctctcctcatgcagtccatctgcctcattctcgcaatgctcggcctgcagtaccttctgctcaagtaccggcgagcaccatctggcgagatgcaggccaagccggcgcggcctttccacttctggcaatggtccgtctggttgcgcggccctcatcgcccccctgtcagctagctgcctctgacttgtgttctcgctttacttggcctcgcctcctcgtgtttccgccgcaagggacacctacggccagtacatcgaattccttgcggccctcattgtcatcctctgcgtgctctatctcgttctcggcggcttcgactggttcatcgacacgctcggcttcatcggtgcgctcttgacttcggcagctcgagtttgttgacgagctggaggcaacgggctgacagacttgcacaccccagcgcttggcctcgagagccagcttccgactccacagctcatcaagaactatcagctcaagtcaaccgccggccttcagctgatgacaatcgcgggtgcgccctcctcttcgacacggcctgtctgaagggaccttggctgatccccaatccacctctcttgaccacaggctggctcggtggcgacatttacaagtacgggcggccgctgccgagatcgtgtgcgtcccgcccagtgtgctgacgagcggctttaccctctccttgtgactcgttgcgcaggaccgtctacttttgttcgtgctggccgcaaatcctgaccttctctagatgcgtacagctgatgcttgctcctctacagatcttcgcgagtccccctcgcaattcatcatctgcggcctcatcaccgtcactctcgatctcggtccgtcctcgcccgctccactcgtgcgtctaagctcgctgacgctcttgtgtgtctgtgacagtcatcgttggacagcggctttactatggtgccggcgaggccaagtcaaacagccagggcgaggacggcgacgaacaagatgtcgaccgagcggggcagagggaggccgggactgcggaggagtccaggggtctgacggccaatgccgagcgatagcaatgtctggtactgtggctttggcacagcacgaggtgattgcaatggagtgaggtgagggtgtgcaatgctgcctggagtttatggatacttgggagcgcacttgacattgcatgaaagtacatgtaactttgctagtactacaagcaacgtcatattacctaatggtggcgcttccttctcatcttctggagaggcaggttcgattcctgcatggacctgttcaaatggtccattagtatatcggctagtacgctagattctgaccatgagcgccggcgttgctttttgtcgcaacgcacgcctgtccgcggaatcatcgtttatattccacaacttccgctctttctggcccatacaaggtgtgatcgcaaagccgagctccctggctattgcctgctgtaatggcatcgcatgaaagttgtgtcgagagcgcatcatggcttgaaggttcgtaggtcaggagttgttacgcgcccgtatccgaaccgactcgccacatgaggccgtctcgctgccgaacgcgaacatgtccctgttcaggaaaggtgcaggatatatcgagggccgaggcttcgaagccagtcagctttaatcgggtcgtatgagtggcaggagttccaagcaaacgaccgtccttccgactctcgcgcggaagggttgtataatatatcggccagtacgccagattctgacactcagacgttacgttttgcccccttttcctttgctcatgatgtcagcctagtactgccggtcttcgctcagcctcctacagccaaggtcagaagagtctgctctgacgacatcagcggcaaggagggctggccggggcgccgacgcgaactccgccgctggtcgtgagccggcggcttccctgcgcacctcctcgacaaccaacaccttcatccctcgttcagagctacgccgctcggctcgctctcatgatccgccagtcagttgcctctcttcacggcgcctcgcggcaagtaacccgagctcggtccggtcaggcagcagcattcgcaacggcgccgccgagctcgagcagctcgggcctgccgacagccccgccctcggacgagccgtctgggctgccgtctctgccgccgtcagacaaggaggagccgcatgagcagtcaccagaggacaaaggtcggtcgcaggccatagcgatgcgcaagcggaacgagctccgtcagctcgagcatctgccgagccagaagaaggctcaggtgatcgagcacggcgtccctacttaccacttcagtgcgtatgtcgctgcgctggccagctcccatcggctgtgaactgaccctgaccttgctgctgcgatttcgcagacccgcctaatgccttctacaacgagctcaaccccgaccacgagacctggcggcggacgacggcgctcgagatcagccacagacgcgacccgcccatgcgcgtcaagatgctcgtccgcgactttatcgacgactcgctctacaacgtgagcaccttgcgggatctctgaaggagagcccacagtctatcctaggctgacctcatgcgctggcgcctgcagccgagctacggctacttctcgaatcccaacctgagcattttcacgactgcgaccgagaaaggctacgacttctcgaccttccgatcggccgaccacttctcacacgcggtcggcgagcggtacgaagagtacctgcgtattgaggaggagcagtggcagcaggacggcgacgtcgaccgcaagggcacgaaggaggtctggcacacgcccggcgagctcttcaaggtccgaccgacgcttcctctcggatcttgcccctacccgcgctgacctgctgtcttgcctcctgtcttgcctaacctttagccctggtacggccgggcaatcgcacgctgtctcgtgtccgactacaagctccgtcactacccctacgaggacctcatcatatacgagatgggtgccggcaacggtacgctgatggcctgcatcctcaacttcatccgcaaggagcacccggacgtctatgagcggacgaggtgtgtcgctccttgctcgcatgggctcactcaagcgattttctgataggcgcgccctttctgcagctaccgcatcatcgagatctcggagccgctgagcgagaagcagaaggctgtcgctcgcaagcatcaccacctcaaggtcgttgagattgtcaaccagagcatctttgactgggaagagcgtgtcatggagccctgcgcctttatcgcgatggaggtcttggtacggcctatccttgtccgacgccctgctgcagcctggcgctgaccctttccccactttggcaggacaattttgcacacgacatgatccgcttcaacctccagaccggagaaccggtccagggcatcgtcatcatcgatgacgccggcgacttccagctcgtctacgagccggtcaccgacccgctcatccagcagtttctcgaccttcgggcgttactgcccgcaccgctcaaccagtcgccggcgttccctgcctggttcgcagagtcgcctactcttcgttcgctacgattgcagctcccattcgcgccgaatctgagcaaggccgagtacctgccgacgaaggcgctgctcttcatggaggcgctgagagacaagtttccgcagcatcggctgctgatgagcgactttgacgcgctgccggatgcgatcgagggccacacggcgccggtcgtccagacgcgatggaaaaacacctcggtcccggtctcgacattcatggtccgccagggctttttcgacatcttcttccccaccggtgagtgctgcgtctcgagactgtagcagcggcatgaccgctgactcgttcacccctcattcttcgtagacttcaaactcttccggagcctgtacgcgctcgtccagaacttgccgtcatcgctcccggcctcgcgcctgcgcatctcgccagcgtcgtcctcctcgtccctacctcacccaagcggtcaccttccgccagacttcttctcgcccaacgcctcgaccgagcttccactcttgccctcaccgtccgagctcaagaatccggccatccggcagggcgacgagaagatccgcatctacaagcacgaggacttcctccgggcgtacggcgccgacgacgtcgccaagactcaggtcaaggacggcacgaacgtcatgctcaagtggttccagaacgtcagctttctcttctagagtcgctacctgcacccacgcggccgactcgctttctgaaagcccctgtcggacaccggtctagccagcagaggccgtattgccactcgttgtccgcctgcggcaacgaggtcgctgcgtcgcgctcgattggccaccccaagcatctcatcctcgccgcatcacccctagtcgtgtcatccactcaagacgcctgtcgtctttggacccccctcggcgagcgcatccagtgcaccagcgttgccggcgagcgcatgcacgccgcgccggagccgcatccggcgggaccgcgctttgcatcacatggtctcctcccggcgcttttgaaaagcgctgctgtcagttgttggcatcaagtcggcgcggcatcaatcgtttctctctgaaggccgcagcctggttcggccgcttggggagcggcggtctttgtctggaggacgaggcgagcgagagatgaaggcgaattcgtaatcggcgcttcaccgacaaaacgaaccctgaggctatccgcgctggctagtgatacaggcatcgatagcttggcacgacctcgcgttctctcaatcggtcgtccagcgcggcacccgctctcgaatcctcgatcttcgaggcggccgactcattggatgcgcctcgagtccttgcgaatgccctcgagcacctcgccctcgacctcgtcctcctcctcagacgacgatccgccgcggtcgctcccgagcgggctgaacagcaggctctcaccttcgccgattcggatggtgccctgctcggaggagtcgagcagcggatccgggatgagggccggcattgtcgggatgtgcttcaggacctggtggtagatgtagctgcaaggatgggcgagggatagcatcagcacgtgcttactcgggcatgagactcctgcggtaagctacgcactagccggtgaagaacgagatgctaagcgcgaggatcattgaaccaatgttgagcgccttcgagaggccgtctgagccctcaccctcagcgagcgagtcgagccgggcgccgacaaagacgacgatgaccgtcttgggcagcatgcaaatggtcgcgatgaagaagtggatgaaggggacgccgtccatcgtctgcgagttgccgaagggaggggtcagacactgaacctccgacggaacgcaatagtctggaccctacgcacggcgtaccaggcgttgctgagtgcaaacggcagcggacaccatcgcaatgcgatcagcaagccgaggcttttgctcctctgctcagacgtgcgacaagcgatcgtagagccgtcagaatcttaggtctgcctgcccagcacagacgacgcgatccaactcacgacgaccgcctggaaagcctcgtacttgccgccctcgcggccgcggccgttcttgttgcccatcatgcctcgaaattggtccttgagcaagaaccggtagacgccgaacgagaaggacgagccggcgagcgtgaaggcgaaggcgatcgggatgcccggccagaggccgtaggtgaagccgcagaacgtcagggccgaagcaaagccaaagaacggcggtacagtggcaatcgctgccgtagaggatcaggcaggaaaggggtcgccatcagtttgaggacaggaacggagcgtgcgcagccgctccgagagggcgaggtggtgccggcgaggtcaagaggctgcacgcacagatcatgagcccgacgagcacataaccactgaagcccatcgactgcaggttcgccgccagccgcgtgaactgatgggaagaaagcatgaccagggtggtcagcagatggccagacgatctctggccgacagtcatcaggtcgcgtcctggagccggcccagcagcagcagcagcattggcgcctcgcgggtctcacaaagtcgccgatcgccttgggcccgatgatggtgatgcccgcaatgaggacgacatgaaagaggacgagcgacctgcaggaagagggcgggtcggtcagcaattctgagagatcgggtggaggaggagaaggcgctgccgagagcgagagttgcgcaccagatgaagatctttgtgcccgacctgagcttacggtaacgctcgggcagcgagcggacatagggcacgacctcgtgcgagtattcgaccgcctggctgtatagggctgctgcagacatatcaaaggagagacggggtcgctgttggtggccgttcggtgggagccgagactggtctcgacctggagcagcagtcgacctttgcccctgaaacgtcgacagcccgccccgaccatgtccagcagcagcagcagcagcaagccgccgaccaagaagcgtgctcgcggcctggccgccgccgccacgtcgtccaaaaaggccaagaaggctgacgaggtcgaggaggagcagggcatcgagaacgccgccgagacgtgggccgacctcaaggagctctgggagaatgccttcgacgccttctcgggtacgtcctttcgctctcgctcaacgtcgacagcttgacgtgctgaaactcctttctggctggcaggcgaggacccagcgacggccgctcccctgctccgcgggctgatctttgagtgcgatcgcatcgtccgcaactcggtcgacgccctgcacccgctccagacgacggccgactctgcgacgcctgcagtcggggaggaggacgacgctggcgtgacgctcgagcgcttctacctcatctacggtgcgtaaagagctgcctgcctatattgctgtggctgctgagagctgacctcattgcttgcccgcctggattgaacaggaacgagcgtttatgccctcggccagctcatctacctgcaggccgagcttgccctctcgtccgagcccgcccctgaggccttcttcgggaaggcactcgacttcctgctgacgtcgccgtcggcagccgtggcggacgacgacgcgcctctgcccgaccgcctgaaggccgccaccgagaacggcgactggaaggtccagctcgggcgggcacgggcggtcatcggtctgctcgcagcggccggctcggcggacaatgaggctgtcgaggaggagcagtttggccccctcctcgcctgggcgacgtcgacaacggatgccgtcctcgcgcaggtcgccgcgctacctcagcccgaccctccagccgagggcgaactcgcccctccggcgcagcgcgacccggcaacgacgttcttttcgtcgccgccaacggatgggcagcggctcgcactccgcctctcagcggccgttagcgtcgcaggcatcgttgaagccctgccgccgggcgaccaagccgaggctgcccgctgggctgaggcctgcttcggcgacgttgagcagacggcccttgcgcttgaggacgccagcgagcgtgatgcctggcgcaccaagtccctgatcggccgcggtagcgtccgtctagcgctcggcgccgctcaggccgagcaggtcgtcgagaccgagccgacggaggaggacgaagcgttcatcgcggcgtccaagctgctccagtcggcgctcgacgatctctccgtcgcgcgctcgctccgtccgcgggtgaccgcaccggagcctgcacctgagactctagagggcgcggacgaggacgacgaggacgagatctcggccctgtctgtcgaggcctgcctgacgttcgttggcctctacgagtcgctcggcgaggacgccgagacgcaggtgtcgatcaagaaactcgaggacaaggcccgctcggagggctgggagggatacggcgaggacgacgaggactcagagggggacgacgactgagattgatggccctgtcgaacaaaacggctccacgtctgatatctgcaggcaaatcaaagaggtgaatgaggtgtgctggtcaggacgcgatgaaggggacaatcgttacgtcggaagtctgcgagcaatgagcaagcaaaagagccgacgctgggaatgacgcaaaagtgaatgctcgataactggattgaacagttgacctcagcattgcgtacgagtacgagtgccgcgctctaccactgagctaaacgagcttcgatgtttggcaggtttgcttagcaaacaaaataactgtacgttagcgaggccgtcttctaccttgtcgccccttccttccaacgaacagcagacctgctcaaccgccgtacgctgaagctgagcagctcgtccggcatctggcttagatcagggatttggatttcagagccagggcacgaccccgaagcgcgcttgtagatccttccccgcagagcccggagagttcagaggtttcgatcgccatctcggccaaccaacggcgggagccgagcgcgccccttccagccgtcgtctctgcttgcttgccttcccgcccttccttcccgccgcgctcttctctcgccattcttcgtccttcctgccagctgctcgtcaccgccgggccaagttcccttcgttttcaagctctcgtccaaccctcacgccgcccgcagcaacccatcatgtcgtccgaggaagctgccgccgtcgagccgacggccgccgcacccctcccgccgacgacaacaacatcgacctctgccgactcgtccccagcgaatgccgccaggacaggaacgacgacccgccggccgtccaaagactcgctccggccgccgcaggtgccctacgccgacgtctcggcctcgcccgagctgcacgtctcgctctcgtctggctcgctcgcgtcgtcctaccggccgggagggttcgggaccgggcccgagtcgtcgacgctttgcagcaagccttcgacgaccccgctggtcgactggggcaaggctgcgtcggacgcctttgtccagaacgcaacgccggcctcagagaataagccggccgagggtgccgtcgacgacagcggcagccgaccgcagccgaaggccttcaagcccgcgaaccggttcggcggcggcggagggcgcgactggcgcttctggatggtcttcctgtcgatcctgctctcgactttcatcgccgccctcgacttggtacgttgacgtcgggtcggatgcaaatatctcttgactgaccgccttccccttgatctcctagacggccatctcgaccgctgcgcccgtcatcgtcaactcgctgaacggcaaggagttcacctggatgtcagtcggcatttgacactcttcccttattcaggctacacgctgacctcttcttgcttccacacacgcagcggctcagcctgttcgtcgcgccgcgcttcccactcggaccctgcaacgtcgtgctgacccttcatcacccttcccgccctcgcagacggtctcacctcggtcgcctttttgccctggtccggaggcctcgcgcagatttttggtcggcgggccgtcctcgtctcggccatcgtcatctttgcgattggctcggccctctgcggcgcgagccagagcatgtcgatgctgatcgcgagccgggccgtccagggcatcggctgtggtgggatcctcagcttgagcgagatcatcatcggcgaccttggtgcgtccgtttgtagggctccatcgtcaacgggtttctaatctcctgttcctgtcacagttcctcttaaagagcgaggcatctttctcggctacctgggcgcgacttgggccatcgcttccgcacttggtgcgttcgccatgctatcatcaagggtaatccagtgctgacctatactttcgcgtccactcaaggcccgcccatcggtggcgctctcagcgagcacgcaagctggcgctggctcttctacatgaacgttccactgtcggcaatctctctcggtgagtacccccatacacgcggcggccactcttgccggtcctgacgcacgccttctacccgttcaggcttcgtgctcgccttcatgcgcctcaaggtgccgcaggagacgttccgcgagaagctcaagaagatggactgggtgtcagttgactctctggcgctgattgttatcgcttgcagctgacgtgtttcatttgcctcgtcttgtcaaaagcgggaacggccttctcatcggctcatcgacctcgaccatcctcgcacttacctggggcggcgtcacctactcctgggcaagctggcgcatcatcgtcccgctcgtcctcggcctcgttgggcttgccttctcctgttggtttgaggcgtgcgtcttgcatgaacgcagctttccttttcgttgctgacatacagtcgtatgattgcaggaaccacgtcaaggagccaacggtgccgttcgagttgctctcaaatcggagcgccctcagcggctacgttgcgacgttcctgcatgccatcatcgtcgtcgcccaggtcttctacctgcctgtcttctttcaggccgtccttggcacgggcccggcggtgcgtagggcgcctggtctctcagaggcaggtctctcctgacgctcgcctctcccaggactcgggcatctacctcttcccgacggtcttcacaatcgctctcgcagccatcgcttgcggcctcggcattaccatcacgcagacgtatcggatccacaattatgtcggctgtgcgtcgcacatgtgcgacgagagttctccctttttgttcgggtgactgacgctacccggcctcaccccgtacagggctcttgacgacggtcggcatgggcgtcatgagcctgatggacgttcgtccacctccactttcgtttgcctcttctgcagagcactgatcgctgacttgtgcacggcggcctccaggtcaactcgccgatgcgcgactggatcggcttccagttcatcgtctcggtcggcatgggcatcctctacgctgccccgcagttccctatcctggcaagccttccgacgagcaagacggcacacgccctcagcttcttcaccttcgtgcgttctcatcccgaaagcaaggctcgggcatcgtcatgctgattgtctgccattgttttctttcaggtccgtaccttcgggcaggtctggggcgtgacggtgagtgttactcgcgtcgtcgagctacgtcagcagtcgctgacaagactcgtcccgaatcgtcgcagatcgggtctacggttctgcagaacgagcttggcaagcgcctgccagccgactacctcgcccgcttccccgaaggcctcgaaatcatctacgccgtcattccaacgatcaggaacatcaaggaccctctgctccaggctgccgtcaagaaggcctttgccgactcgctccagctgctctgttcgtatcatatcgcactcacgccctgacgacgacctgcggctgacacaggactcgaacttcgctccgaccgtcagggcgaatctgcattcccatttcgggcgccggcctcctcgtctccctactgatgcgtgcgatcccgctgcacagcaaggttgacgccgagtttggctaccagcccacgcccaacccccgctcggacgtcgacggcgccgaaaggggcgaggcggacgagtcgcatgccctggcagtccagaccgtcccctacggcagcgtccagggcggcctctcgagcccgagcttggcacgcgagaaggaatgggtggcaccgctcagcaggccttctgacggttacgttcactactcgcctccaaaggccgaggagcgcgcctgagaggctcgactctttctcacctctctcttctgtacatgttgactctccggacaatctctgatctctcacgtcgctcctctcctctctattctcgtctcctgttgaccgtcctcaccccttcaccaagctaccctctcgactgttcgtctagctctgcataccatttttacgttttgggctcgcccttcaatcacttgctctcggaccggtcgaggacgatccgcggcacaccccactttgtcaggccgagacagagtcggaggacgaggaggtcacgggccatgccgagcgagtcccagacgaggctgatctttgagccggcgatctcggtccagtcgatcggcgtctcggagatcgggatcggcagcgacttggagcgctggaaagcgagggtgcaggtaagccgcagctcagatgaggatgagaggtgtattgggcgtacaagcgaggccggcgtcaactggacggtgcaggcagaagccagtacgagcagctcgacgtcaaacgaccagcgctcgaggtgcatgtcggcaaagagcaagctggccgcgtcacgcgtaaagagctgggatcgagggggcagacgcagtcagatggcgggacggcgacggagcagagggacaaggattgaccttgaagccgcattgggtgtcgcggattgcgcgcacgccgagcgtccgcacaaacagatgaaacgagtgcataagaaagttccggatcttcgaccgctgttcattcggcgcaaatggaaacgttaggcgtggtcgtcgtcggctgccagcctgagccgcgcatgcgcgcccatcgtatgaagaggggggcgcaagagcggatgaggtctcggcttgcagtagcaagcgatagtacaagcggaaagagcgcaccttcacgacgaggtcagtcgagacaaggtgcgcacgggacccgatggcgatgcctagcttgccgacctgctcgacctccgagtcccggccagcggccgcgtcgtcggcagctcgtccagtcgtcttgttgttacggtgcctgatgtcctgagcgggaacggcctcgactgctgatgacccggcctgtacgctcgggtcgggcgaggccggcacgctggctggaatggcggtcgggtacgggacctcgacggcgtccagcgcggcttgaagggtcgcgagggacgggaaagccgacgcgccatctgcgtcggcaaacaggacgcgtgcgccgcgcgagtgcaggacgcccttaggaaggagacgaaaagggtcagccagctcgtctgcgcagcgcagggcccagagggccatcgacgtacgtgtttgaccgcgccgcccttgccccggttcgcctcgagcttcacgacacggagctcgccacgaccgatgccctggccgacctcggtccaaccgagcttctcccactcgtgaccaacgctgagcgcgatcaggtcggtcccgtcctcggaaccgtcgtcgacgaggatcacctcccagccctcgacgtccactaagacgcccgcgccaaacgcctcggcccgcgtccggctgggcgccgataggaactcgtggacatccttgagcatctgcggcaggcgcagcttctcattgtaggccgggacgacgatggagagggcgacggccggcgctggcgccggaccctttgccgggtcgagcgctggcgggagagggagcagccgctttgggtcggccggcgagacgtagagccgctcctcaggtttcgagctcgtcgcctccggcacgacgagcaggaagaggccgtagaggaggagcagggccggcgcaaggagcgacgacgcgagcatgagccgttcctgtcgggtcatggtcgccatctgagcccggagcgaggcgaactcgccggcgaggaagcggaggaccgggtcgtctggcgccgtcattggtgaaatgcgagctggtcgagaagtgcgagagggcaaaaagctgctgtcacgactgctccttgatcggccttgggggtgtcgagcttctggagggcgagatgatcgtcgagggcgaaggccgccccggcccgctccgggctctttggtcggtcaagccggacgagagccggcttcccctgacgtcgacccctgcctcgcccttcggaatccgtacagcaccctgacgacgatcaggcgtcctcgtagagccctcaggaaacagcactgctcgctctctcggtcgactcgtcggagtcgtcctttccgagacgccacgccggtcagcccgcgcagccttcgccgcctccatccaccggccagccccctccgaacgggctcctcgacccagccgtaacacactcgagtgaaggatggtgtgcaagaagtgcgagaagaagacgtcgaagctggcgagtgagtgcctgcttcccatacgagcatactcagactgccgagctgacctggccgcctctctcctgcgttctcttccccgtccagctcctgacccggtcggtttctcgcttcgattttggcatccttttgctgactgtttcaatgtctgctgtcatctggggcttgtagacgcaggcctcgacgtcggctaaccggcgagtcggcgagaacaagcttctgtcttcgaagcgctactcgtgcgtactcgccgatccggctcccgtgttccgttatgcagacccgacgagctgacgacctaccgctcgttccagaccgtacgcaacctactcgggcaagtgcaaggattgcaagtcgtcggtcgcgcaggtgcgcctttcgctcagctccgcatacctcgacccagtgcgctcgaggctgatccgccgtcggtttgttctcaaaccagaacggtgccatctactgccactcgtgcgcctacaagaagggcctctgctcgatctgcggaacgatggtccttgacgtgaaaaaggggtacgtcgcttccgagctgcttcgatgcttatacatcgactgacgatccgttctgctcggctcatgacggactacgaaacagaggctacaagcagagcagcaagtagcagcgctgccgcgtacacaacacaggcgcttcttgagcatcaccggctgtgacacagcgagccacgccccgccgagcagcatctgccaagagcggcttgacactcgcagacaaccgtcgcgggtcggccttctttcgcgtccttcacatccccactgttgtactgcttttgctcggccaagggtggccggctttgcgacttctctctcgcaagccagcagtgcggctgcttgacaccggctgcatgatcaatgagcatctcacaatgacgacgtgtgcaccacttgatgtcccgggctctgcgtctgcggggaaggatctacaagcgcgcttcggggtcgtgccctggctctgaaatccctgatctaagccagatgccggacgagctgctcagcttcagcgtacggcggttgagcaggtctgctgttcgttggaaggaaggggcgacaaggaagaagacggcctcgctaacgtacagttattttgtttgctaagcaaacctgccaaacatcgaagctcgtttagctcagtggtagagcgcggcactcgtactcgtacgcaatgctgaggtcaactgttcaatccagttatcgagcattcacttttgcgtcattcccagcgtcggctcttttgcttgctcattgctcgcagacttccgacgtaacgattgtccccttcatcgcgtcctgaccagcacacctcattcacctctttgatttgcctgcagatatcagacgtggagccgttttgttcgacagggccatcaatctcagtcgtcgtccccctctgagtcctcgtcgtcctcgccgtatccctcccagccctccgagcgggccttatttttggcgctcagtgtcctcgtccaggcatcggacggctcgccgggtgtccactgtttccgttgcagctccgagttcgtctgctcagcaaccagcagccgtcgtcaaggcccctacgtactctacctccctccatgcctgcgagggcctggtgcctcgtcaagctgcaatcgagtgctgctgaagagggtggttctacaacgccttcctttggactggaaggaatagattgaaattaggttgggagaaggccgagagccaaaacgagagctcgacaaaaagtatgtcgctgacctgaatcgaacaggtgaccttacgatcttcagtcgtacgctccaccaattgagctacagcgaccgttgagctattgagctcggataaatttccgaccaaacatagaagtgtatattcttgctgtgcattccggcggaggcaaggggctgcaacaggcaggacaggcaggtaggggcgtccaggcagtctcctcacctccgctcttcgaccatcactttctcgactcgacacgcgacaggcagcctgcgctgaagcccaactctttcctcagcgccctttcctctcatccacagcctattgcccagccagtcaggccgcagcccgctcgacgagatgagctcctccaagcagcccgccgacgaggtgcgtctcgtctgaccgtcctcggcagctcctcacgcagctcgcgactcctccgagctgacccgctgccttgcctgttggtccgctttctcagggcgtcgacatggacacgctcagtctgtcgcctttcgtctccgctcgagcccgtgctctcgtcggccagcagggctgacctccctctgctctccccctctagtgcaggactcgtcctcctacggccccgcctcggaccggctcattcaggagaacgctgagctcctcgccgagctcgagcgcaagaagcgggcgcgcaagctccagaacgtaccgaccgacgaccgcaaggtccgcttgcggctgagggagctcggcgagccgatcacgctgttcggcgagggcgtacgttcatcttcctgctgctgctgctcgcttgtcaagcatgatgcacttgctggagaccagcactcgcggcgctctacactgggccgttctaccgagtgtcgcgtcgtcagggctcaggacagaagcttggcgagctcgccctgccttaccgtctcgcgccctgtcggctccctcggcccgccttagtcccttggctaatcctgttcgcatgacccgcaggccgccgaccggtacgaccgattgcgacaccttctatcggtgcgagctgtccagagggatgagctcggcgaggacgacgatgccgacatggagtcggactcgagctcagattcgggcgagtcggatgtgagtctcgctcccagacttctctctgaccctcgtagtgtctgacagcctcggactgcgccctacaggaggagttctacaccgagcctccgctgccagaagagttgctcgccgcccgaagaaaaatcgcgcgcttctccctccctctcgctcagcgccggctccgccagcagcgggccgaggcctcgctcccactcccgcgcatcctcgaggttcggcgcaaggtcttcagcgacctgaaaaagacggtcctgcttggctcgcagattggcgacacgcggccgatctcgaccgtccgcttctcaccgtgctcgagcatggtcgcgaccggcagctggagcggcggcgcaaagatctggggcgtgccgaacctcaacgaggtcgcgtcgctgaaaggtgcgtctgcctctactccgctagcgtcgctgcgatccgggctagaccccgcggtgtgctctgcggtccccgtcattgcagactcgcctcggcgccgctcagagcgccgactcgtcgcaagcgttcgttcggcttcctgatcaccatctctgctcgtccgcaggacacgacacccactgccgaggccttgcctggcacccgcgagctgggcttagccaagacaggtccgctgtcaaccttgcgtccggaggaggcgagggcaccgtcaagctgtggagtctcgacaggtgcgtacgacttcatgatgcgcagcccaagcgagcactgagccgcaattcaccatgcagtccaacgcctttgacgacgctgtcaggccacagcggcgccgtcgcgcgcgtcgcctttcatccgtcgggcgactacgtctcatccgcgagcttcgatggctcttggcggctgtgggacctcgagacgagtacgcactgcgcgggttgatgataggagtctggaccgctcgctgacggtgtgttttctacccggttttaccaggtcaagagcttttgaaccaggagggccactcgaaggaggtgtacgccatcggctggcaggatgatggcgccctggtcgcgaccggtgggctcgatgccatcgctcgcgtctgggatgctcggacaggcaagacggtctgggtgctcgatggtcacgtcaagcagattacggcgctcgactggagtcctaacgggtgagtcggccattcttggtgccacagcttgcctattaggctcgctgacgcgttgcgtctcattcctctaccagcttccagctcgcgtcgggctcggccgacgactcgatcaagatctgggacatccggaaacttgcctgcgcgtacacaatcccggcccacaagtcgctcgtctcggacctcaagttcttccgggcagccaacgagcgggtgggcgagctgcaatcaacagtcactgccgacgggcccgttaagaaggaggaggagatggacgtctcgctcgactcagcccaggcggcagcggcagcagcggcgactcccgccccgctgccctcgtctgccgtcaaccgctcaggcctctacctcgtttcgtccggttacgactcgactgtcaaggtctggagctcggacgactggcagctcgtcaagtcgatcaacaccgactcgggcaaagtcatgggtgtcgacgccgacgccgagggtaagttcctcgtcgccggcagcggcaaccgcaatttccagctgtttggcgccgaggatgcgctctgaagatgcggacatgacctttttcgccgactgatcacttgcactgcgtgcagaggcgttgacgagtaccggcgcgcgacggcccgagtcgaagtatttgtcaagttcggcagatttctttgtcgccgcccttcattctgaagcaagtgttgtcgcattggtcatacaacgggcgctaggcctcaacgcgtctagttctacgagtgatgagcagccgggcgtcatcgcttgtcgtcgggatcgagacccaccgccagggagacctcctccttctccgcttgatggagcgaagacgtgatgggctcggccggcgtgtggcctacgagcttctcgacgtctggcgagcactcttgcttgggcgctgcaccggcatgtccttcatctccagtggtcggcgactcgagcgcttgcaagcgtcgtcgacgccgactcgctctcgggttgaggatggcagccaggacgaggatgccgccgtcgaggacgacgataccggcgtagttgacggcggcgagtgcgtcaaagtcggtcttgtaagcaagtgagagtgtgcagaagacgcctccgagaaggtccatctgtccggcggcgatgacggccgaagcaaaagagggccagaggaaagtcagcgacgtaggggaagggcgagctggctaagagtgacaagactgaggacgcaccgacataaagatgagcgacaggccgatgacctccttgaagcgatagatctcgagatattgcggaatgagaccgccgagaaggaggatggccgagatgatgccgaagacgagcagtggggcgtccgtcccggccttcgtcccagcctggtgggttgtccacaagatcagactggcgatcgtcaagcggatcactagtgcaacagccgaaagactcacacggatagcgtagacgaaggcgacttcgaggccggcaaagagggaaaggtaaccgacaagaaggccgatggagcggttgcgcgagagcttgcgcgggccgtagtagaggcactggaggcggtagcgccggaatatgaaagcgtccaaggaggatgagcagaggtcctgtctgcatctgctgaagaggtgtctcctctctgctgcccgcctcgaagctcgacagagaggcaagacgacaagagcgagagccgcacctggacccagcagacggcggccagggcgccaaaaagctgcggctggagcattattgggacgttgatcgactgggcaacgacgtaggcgcccagaaagatactggccgcgctccagatgaacctgaggtgtgagcgggtcgagctcagggtcagtcgagtcgagaggggaggtaaggtcgacctcgacacgcaggcttcgccttctggctcccgggggcgacctcgtgccgttgaaacacaggccggacatacatgagccatattgagagaccctccacatctttgcgacggtagttgaccacctgaaagcaggccgggggcgaaagacacaacgtcagtgccctcagtcctaggacgagctcgagacgagctggcagctcctcacgatctgcgggatgatctggatacaccagagcacggtgccctgtcgttcgtccagcacaacacaggtgatgagagcgaagcaggtcgtcagcttcggcggccatagctgctcatgagcagctctcgacgagggcggcaagagagggtgcccgactgacgatcgtgccgaagacgttctcgagcacggcattcgcgaccatccagctgtgagcaccttgaagttgctcgactgatagatgagtcaggcaagaggaccagttggcgctgacagttggaagacaggtgacaaggcgagtcgagctcctgaatcggcctccgccgacgctctgctgtcggccgataacgctttcggctaagcgggcccgatgttgacctcgaggatgagcccgggagtcatcattggtcctgatcaacagcacgagggaggctgaacagagcactgaacgctcgcgaaaatcaggcacggggtttgagaaggcaggtctagcgggacgccatctccgcgcaccatcttcgcctctgcagccctgagatccagatgagacgacatcctatatgctgcccgtgataatctgcttgacgccgtggagaagctctccgacgcttgagaagtaaaagagtcggacgaggccttggacgaaagccgcgctcttggcggccgacttgaccgggtagtctagagaaagagaaagcggagtgatcagcagcctcgtcgagctgggtcagacgcgacgagcgacaggacgcaccgacaggtggcgggatgccagtctggacccagccgtggaaacggtcggtgatgaccgacttgaggttgcacaggcctcgcaagccctcgggcccgccgaaccggccgtagccagacgccttgcagcctccaaaaggcatcgcctggttgagataaaagacgcctggaggagatagtgacacaagggaggagggcaacgcgtcagtgggccgatgcgtagcgggcgtgctgacaggccgaccgctccgacgcaccgaagtcgttcgtcgagaccatgccgcactcgagctcgcgggcgacatacatcgcctccttcttgttgcggccgtagacggcggctccgaggctgcgagccagcaacatagcgaggaggtcagcgaaagaaaagagttgagttttagagtgtcgacgcacccgtaacgcgaagagttggcgatcgcaatggcctcgtcaaccgtatcgtatgcgatcaagagcatgatcggcccaaagacctcctcagtcgcgaccgcggattcagggtcgacgtttgcgaggaacgtcggccggaagaaggccccgacgccgtcagcccgttgctggcgcgaaccgccacagatgagctcggcccccgcctcgacggcttgcttgaccctgctctcgaggtcgtcgaaccgggcgtcggagatcattgagccgcactcgaccggtacgtcgctattagtgagggacgagccgagccgaaggctatcgatccgcgccttgagcgccgggacgagtgccggcaggagagagcggtggacgatgaagcgttccgtggcgatgcagccctggccagccgactggaagacggagcgcatgaaggtcgactcgaaggccttgatatcggccgacgggaggaggatcgccgggtccttgccgccgagctccatacagcacggggtgaggttcctggcggcagaggctgcgacaatgcgcccgacctgctcgctgccgatgactggggcaggcgacggcagtgtcagcacagacaacgggccaggtctcgcatagtgggcgtcagcgaccgacaggtaatgtgacggatcagggggtgctcggtcaaagcgctcgcctgctcggggtagcaaacgacgagctgtagagacaaagcccggtcagcgtcagccagtcgggaagaaacgacggccactggtaatggcggcaggcagaggctgcacacacctggacgagatccgggtcgtggccgcaagccgccaggcagtcgcgaacggcgccgatgaagaaccgggagctccaggcgacttgctcactacacttgaggacgacggcattgcctgagcgcatgatggagcaccgtcagcggatttctcaccgaggcggcgcgacttgtgggcatagactgacctgtaaagagcgaggcgataatcggcgacaggccgttgtgaaaggctgtagacaggacatgcgcgcatcagcatcctgaaccctcaaaagcagctctatcggccggcagacacgtacggtagttccagctggaggttccgagccgggggagaaggagttcagcttacgggtcccacgtggccggacgcgagggacacttgggaacctacgaaacgcaagcggcgacgacgcccaagggctcgtagtagacctttccgatgcgcaaaatgacaaccaagaatgtcagcgagggcacggacgactctttgaatgcttgactgaggccgcaccttcgagaccttgtgactcaagatccagttgccaggtcggctctcgggcttgaggtagtgctcgccgtgcttgatcatgaactgaggagcacgtcaaggatgtcagtcgaccacccctgatgtacagatgatgcaacgcgggcggacgaacgtcaagctttgagcacgtcgtaagaatctcgccgaagccagagtcgagcactgtcgatgggcgcgcggagagaagtgcggcgcgtcagtcgctctccgcaaacggcagtcgaggcgcagagaaaagtccgaacccgtcttgccagtgtcgcgcatgccgactcggctgatttctgccatgtcggccgtcacccagcgcatgagcgagcgcatgacggtcctacgctggccaaacgacgagcgggtccaggctttctgagcccgaccggccgcgcggaccttgtcgtcgatcgtagaggccgtgtcggcaggaacggtcgcgatgtgctcgtttgtagatggatcaaagcaggtgatgtagggctgctccttggacgtggcagcggcggccggcgggagaagcgtcgggtcggccaggtgggcgtcgagcgagggctgctcgagcttccggccgcgccaccccgggagagcttcctgcaacccgacgaaatggaatgagagcaagcggtcagatccggcgactgctgagcgacagccaggccaacgaccgcacctcggggtaggcgacatcaaaggcgacggccgtctgggcctcacgaccgagccagagccagccaaggacggcgacgagcacagcgaggagcgcaggttgcaaagacaaatccgagacggagagaacggggatctcgacgagcgccagcttgaagacggccatgacgagaaggcgaagcgaaccggggtgactagcagacgacagaagcaagaggctcgtgcgaggcccggtcgcgtcgcgtcggcccaaggttcccacgccgtctgaaccggtcagcccgcgtcggagggtcgggcgacaggaggcagcagaccgccaggcttcctgcctctcgactcctgccagcagcccactcttgtcgcaatgttccgctcgactgccgctcttcgctcaatggtgccttcatccttcagccggccggcccagcgggcgccgccaatgctgctccggcctcgaccaagcaccctcctcggcacctcgcgcatgggagtccccgtcagccgagcgcacctggcttcgctcggctcgcttcttgtcaagcgtcggtcggcctctacgtcgtcgtctccgcctcctccgtcagtaggacccgcctcggcgatcgttccggaagtcctggccgggccgcggccggggacggagccgatggcgcccgcgcccgtcacctgggtcgactcgatgcccaagtcggtccagccgtacctctacctcgctcgggttgacaagccgatcggaacctggcttctcctctggccgtgcagtgcgtccgatctgcctcgagcagagacaccttcttctccgctgaccaaacggcgttgcgtctagcctggtccatcatcctcgcctcgaccgtcaacggcctgccgctctcgaccccgctctggtacatgggcctttttggcgtcggtgcctttgtcatgcgcggtgctggctgcacgatcaacgacatgtgggacaaggactttgatcgggcggtcggtgcgttcagaggccgctcgttctctcgtagacagttgcgtgtaccggacgaactgacaccgtcggctctgtcgttgttgccctcgtagagcgcaccaagacgcgaccgctggcggcagggaccgtgacaacgacggaggcctcggccttcctttgtctccagctgtcggccggcctggccgtcctgacgcagctgaatccttacaggtgcgtgcagacgacgtgcgttctggcgtgctgcttggaagctcacaatcaccccatcttctgcgctcagcatcgtcctcggcgccgcgtcgctcgtcctcgtcggtatctacccggcgatgaagcgtgtcacctactggccgcagtcggttctcggtgagtcgcgtgtggcccccctgaagcacggcactcttagccaagcgttgagctgactctgcgcgccttttctaggactagccttcaactggggcatccttcttggctggtcggccgtcgctggtgcggtcgactggcacattgcccttccgctctatgccggcggggccatctggaccgtcatgtacgacacgatctacgcccaccaagataagtcggacgacatccacgctggcgtcaagtccaccgcactcctctttggcgagcggacgctgccgatcctctcggtcttctcggcctcgttcgtcggccttctcgcctacgccggcgtcctcgcctcgtgctcggcgcccttctacctcctctcggtcggcggcacggcagcgcaccttggctggcagcttaagaacgtcaacttcgactcgcgcgagagctgctggcgcatgttcaagagcaataagtggctcggcgcgctgatcgctgctgggttcgcgggcgactacctctaccgcgtccagtacctagggctcaggccagaggcagagcaggacgacgagaaggaccacacgagccgccagctcgtcatcgtatgaccatgacgtcttgccagaatttctgtggctggcccataaaagtcctcggggagcgacggaagtaagctgcggacgcgacgctgccggatcggcgtgactcttgcgacccgaccttcaccccgaccttccttctcattctctctttcttctcttttttgcaggatggcacccgctctggctcgtcgcgattggacccggctcgagctggccgaacagatcctggccggccagctcctgaccgtctaccggcataaggtcctccggctcaactcgtggctggcgaagcaccccggcggtgatctcgccctcctccactacgtcggccgggacgcgaccgatgagattgacgcctaccactcggaaaagacgctcgccgaccggctcgaccgcttctgcgtcggcttcctggccgagaaggagcgcgaggttcgacggccttcgagaggctgagcgagcagaagacgccctagctgattcgcgctccctcacacagtcgttcctctccctcgtcccgcccatcatgctcggcttcagcctgcaaaagaggccggccggaggtggtgtctgggtacccctggagggtcccatcattgcgcttgaggctgcccgggctcagcgagccgctctgctcgccgagccggcctcgttgccactcgagaagactacgccagctgctgctgcgccccctccctcatcctccccttcgccgcctggagcggctgctagcccgggcaggccgacgcttgagctagccgacctctttccacctccgcctccgctagccctctcgtcgccggcgcttcaaagggcgcacgcgacggcctaccgccggctgcacgaccgcgtccgggcagcgggactctacaccccgcccggcttctttggcggctacgggcccgacctcgtccgctataccggcctctttctcatctttgtctactgcctctggcaaggcgttcatgccgactcggccacctgggctcggaccggctggctcgccggctcggccgccggtctcggcttcttgtggcagtacgtgactctcagcctctcgacaatgtctgctctcatgaactgattcgtgcccgtaaatcttgcagccagctcacttttgtcgcccacgacagcggtcatacgtctgtcctcggcaagggcgactatctcaagaaccgcgtgctcggcatggtcgtcgccaactggattggtggcctcagcctcggctggtggtgcgacgtgcgtgccatctgttcactaggctacgggaggttgaccgggctgacgagtctttccatgtgaacataactgcagagccacaacattcaccatctcgtgaccaagtgtgtccccctcgccgcgggcgcacgccttagttcagggtctgaccatgccccgcccccctccacccccacagccacgtcgagcacgaccccgacatccagcacgtgccctttttcgcgattgaccccgtcttcttcacgagcgtcttctcgacctactataatcacaccaagtggttcgatgccgcggcccagttcctcgtcccttgccagcaccggctctactacatcgtcctcggcctcgctcgcttcaacctctacgccctctcgtacgcctttctcgtcaagcggggcctctctggcaagcgctccgccttctggtggttcgagatggccggcgttgccttcttctggacctggttcggctacggtgtgctcggctcgctcagcggctggcgcgaagtcgtcggctacctgctcgtcagccacattctcgccgcgccggtccacgtccaggtgagacgatgcttgcgccggacacagctgcgacgcacatcggactgaccggcccttctttgctcctcttgcagatcgtcctctcgcactttgcgcgctcgaccgaggatctcggcgtcctcgagtcgtttgcccaccgccagctgcggacgacgatggacgtcatttgctcgccctcgatcgagttcatccacggcgggctcgacaagcaggtgacgcaccatctgttcccccgcctgccgcggcacaacctccgggcggcgacgctcctcgtcaaggagttctgccgcgagcaggagctcgagtttgcagagtacaagttcgtcgaaggcaacctccaggtcctgtcggtcgtgcgtacccgtccttcattgaggaagccgctcttgcgcttgagctgacctctcttcctcctgcctccttcgccagctccaagacgtcgccaaccaggtccaattcatcgccaaggtcgccgaagccgaggcaaagggagagctcagccagggacactagacgcgcccgttcctttactcgctagatgcaatggccgcctttctctcacgaaagagctcgtcacgcgacgagaccgagaacgtgtgggcgctgaggcaggcaaaagagcttcgttcggcggaaagcgagagtggagtaaggcgacgcagcgcgcgacagagtgaggtgaagccaaaggaggggggcagatacatggcgctgaaggggcggtgtggggttgcgattaggagagatgaagagagcgtccggcgtgagcgagaggctgagggtacgatggagacgagaggcagcgagcgaaaagtgaagtgtgagagagtattcatgcacgcggggtgacaacagtgggggtcgagaccgaggccggggtcggccgaggagccgccgccatcggtgtcgtcggcagctcgtcgtcgagaaggagcagaggggccgaaggctgctgcttctggcccgaccgaccgcgatcctgcgcgggcgagatgccggtgagggccagtccgtcggcaccgtgactgctgctggcggccgacgaccggggccgggcgttctcgtcgtacgaagggatcgacgcaaagacgagctcgggcgtgcccttgtcgtcgtttgccggactgccgatgctccgctcgtcgtcgtccagccgggtgctcatgctgctgccgctgcgcgagtcaaacgtcgagtcgaccgagccgttgcgcgagcgccggctgctgccgttggtgccgacgccgaggccgcccgggttcttgaggatcgagagggcgacgtcgtcactgacgtcctcttccgaggtcgagtctgggtcgggcagcgtcggatagggcaccgacatctgcggcgacggcacgacgacgaaaggattgggcgaacttgggccctgagatgatcggctcagcgtccgcctgttgatcggccgcatgttggcgggcggcggtgagagcgaatgcattatggccggcgacggcgacgatggcctgggctggacagtgagcgcaaccgaggcggcggcggcggctggcgcaaaggccatgttgtactgccggacaacttgctcgagcatgcggatctggccgagctggtggtggcacgccgcgctagtgtgatgcagctggaagcgaagctgcgggcgaggcgagccgcgggatgagggtcagcatttcgcagtacgagtcgacctgctgcgagcgacgaagatgcacctcggtgtcggtcttgcggaagtcgcgctcgacgacctcccatcgccgaccgtcctcgcgccagcggtcgagctcgcgtttgagcttctcgcgctccttgtctttgcgcttgcgctcgtcagccagccggcgggcgtcctcgtcccggtggcggagctcggctcggagaccgtcagcctcgcgccgagcgtctgcaagcgcgaccgagagggcttcgccagcgagccgctcccgctcggcctcctcgatagcggtcgctgatgctgactgagacgtggcgaggctggcctcggtcgactcgagccgaccgcgcgccgcgtgaagttcggtctgcgtcgcttcgagcatgctctgggcagcctggagccgacgcaaggccgtcgcaagctcctggcgggtggccttatcatctgcactaccgccgctgccgggcgtgtcggacggctcgagcgaggccgagagtgtccgcgacaggggtgtgaactcaaggccgagcgagatggtcgaggaggcgagtgtcgtcgcctcggatgaggcgccgccgccgttgccaccctgtgaggatgagactgacatggcgagcgacgagacggacgacggcggcgagaggtcgctctgcgaacccgaccgaggtgaagacacaagaggcctcggccgggacagagacgagagatcgccaccggtcaaagccaagctactcgtcgtcaccggacctttgctgctggcggagacagcagcggcagcagcgacagcagccttcttcttggccttcttaaagagcggggcggtcaccggcgccgcacctgccgatgacgagcccgttgccgtggggctgacagcatcgttcgatccgaccgtctcgcgcgccttgcccttgcccttggccgacgacccgtctagcgagggccgctttgcgagatgcgaaggggcgacgacggtgaacgagccgtcttcctccgaaccgtcatcgctcggccttggcgctgcagccgcggcgccggacgagacccccctcgcatcggacgagggtccagcgacggcgttgacgagctggcggctgctggacgtgaacgaaccggtggacgaggcggtcgggcacgcaggaggtgtcggaaggaccgtcggccgggacaggggtgacagcccgggccgggaaaccgcccgaggcgcaatgctcgacgacgagggctcgccggccgacgcgccgccctttgacttgcgtcgcttgcgacctccgactatctgagcaggcgagccagacccagtaggctccttgctgctcccacctgagttcgagcctgagaggaggaggcctgcatcaccggccgcgccggtcggggcgatgccagttggctctggccgacggcgacgagtctcctggaagacgagctcctgggcgacgagcaagctccgcttctcctgggcgcggacgccgagccaggcccagagccgggtgcccttgtagaggacgacgaccgagacgacgacgacggcaaacgcaacgtttgagcggacagaggatcggctcgcggccgctgctgctgctgccgagccgggcgggccggcccctgggttgttgtggggcgggaacgtcggcggaggaaagagcgacatgcgttgctgtctaggaggatgatggtgtcggtacgagggacgggtcgtcgactgctgctgctgggtgggcgggccgaggaaggaggagccgggaggccgaccggccgagcaaagggaccgaggtgagggtccgaccgggcagtgctcctgcctcggaaggtccaagcggggggatcggggctgagggacgctgccgccggagaagatcgtccagacggccagctgcttggggatcggaacggctgggtcggcacggagaagacgacgggctctagcaggaagtgcaggtgttgagaggcgaggtcaaacgacagaggcgatggtggtcgggcgtcaggccggctgagcgcttggacgaacgcggcggaggcgcagcgcgcctgagcaggctggacgacagaggaccggctttgagccgcagaaatggtcacggacctcggaaaagagctcacaaggatgcctagcagctgtaggagcaggtcccggactgctcttcctgagatgaggaggaaacgcggctgccttgcggccctcattgagctgtcgggctgcctccgatggtctcggcgcaaacgagctggcttcgactttccagatatatccctctgcagcagcggtagcagcagtgactgatcctggctcttgcgagaacgctgaccttcgtaactacgccatcgcctctctgcctcgttatggccgcaagcagctcgtcagcgcccgtcggcaagcatcagcctcccggttgccaaagtcgctgcgatcgccgcttcgccgacagccaagccgcaacctggtgaccgagcacaaaccggatgacgagctgtcgtccttcaagcagcagtcgcgacgacgagctgcgcgtccttggccctgcctgccctgtcctgctcggaaccccgactctgacccagcctccgacggccggccggctccgggcgcagcgagcattccacgcggaagggagaacggacaggacgggccatgtgaaggagagcaaaaaaaagtgtgcgaaggccgttcccttcccggctcggcttactcgctcgtttcgagcgagtaagagagtcgtcggcggtgcaggagggatgtaaagatacggacgatccccgacgacgacccaagcacacgataagccccccttgcgctcccttgcccgacctcggccgctttttcttcgttagctcgctcgaagtcccctccggccggattcttttgcggtgcactggtgctcgacaagcaaagcaaaggcgacgacgagccttttgcttccctgggtcgtcgcggcgttctcttttttctccgagtcgagcgtgtgagggagaaagtcgggggcctcggccctgtctgctctgctcatcaagctcgcatggcccagctgctttcatttccagacgcatcgctcaacatagctcactctgaccgtcttgtctgactcggaacatacgcgtgcgacagagagtagacccaacttgctcgtggatgcgccgggcggactgttttgaacccaaacaagcctccggcgggcggcgaaaaaggatggttcaggaggattgaagggaagaaaaagggacgcgcctgactttggtcaacagttcgatcactcctcgagaggcgttctccggcgtgattcgtttgggcagctcctccatccggtcgactcgccaccccttgctcgctcgctcgctcgtcgaaccagatccggacgacagggcaatcttttcttcccttctccctcttcgctggtcgaagccctctcccgtcctttctctcccaacccccaccgactcgcaggtcgagctcgcgaaaccctctctatctctctctctctctctctgcccgcgctacctccctctctccccgctccgcctcctctctcgcccccgccatgtttgctccatcgaaccgtccccagacaggcccgcgccatcactcaaccgaatcggtcgcgattctctcgccgacctccgcccaatcgctcctctctggcctgtgagtccgcgcgcgatgttggctgacccttgctcgacacccgcccttcggctgacaccgacatctcccgcaactcggcttgcaggagaacgccgcatgcctccgagttccggttccgaccgacttactcgctctcgacgaccgccccatctgccgacgacctcccgcaggggctcggcctgcacttccagcctgtcactcggccagctccgccgacgctcccgccgttcggcttcccgtccgagccgcccatcctcccgtcgctgccggctcagaccgacctgttctcgccggcgtccgtctactcgtccaactcgcccgaatccaacctctacacgtcgccgtcaaccgactcgctgccctcgccgagctcggcacacgacgcagacgacgaccggcacaacgagctcgatgcccgtgcctggtcgcggacgcccgactggctcgacgacgatgacacgtacgactcgcccgtctgggcctcgcgctggacccagcgcaatgagtcgacactctccgactcactctggggcagccacgccgacggccacatcggcggcggcggctcgtcgctcttttcgctcaaccacggcgcaggccccaaggacgtcctcgaggccagctttggcggccggcggtcgtcgaccggttcgagccttggcggccacttcacccacggcatgttcctcccgatgccgcctcggccgtacagccggcagcagagcgagtcgtccgtcggctccctctttcgcttcgccggtccagctgcaagcatcacgacccgctcggcctcgccgcctccgctcatcgacggcgacggctgggacgatctttcgtcggccatctcggacgaggtcctcggcatccatcacgacctccctgaactcggcgagcactcgttcggctccttcgatacggcaacgcagtacggcagcttcgacacacgggggtcctgcgactcaaccttccagtttgatggcccgaacagcctgcgccggccatcgggcgactcgctccttgccccaaagccgtcggcgcatatgtcgcatctgacggcgccggtcgtcaacaacggcagcctctaccccgtgccagccaatgccggcgccgagctcctctaccgacgcaactcggccggctctttcaccgactaccagatccggcgggcgtcgttcgagcgccggtcctcgatcggtagccaccctctcgtcgcctcggtcgactcgcgcgtctcgcccgagaccgacgagggctcaagcgaggctttcccccatctcgccattcctccgcatgctggacccagcagcagccggcgcgagagcagccactcagaactcgagcgcgagatccgcttgtcgctcctgatggacctcgaccggcgggtctcgcaagtcgtcgaggtccaggccggtggccgactgtacgccgctgaccagtgggacatcgagccaagtgcgattgtacgttctttgcctgcaatttattttacatgatgctcagcctgctgactcttcctcgctctccttgtagcaatcggtctggtcgccatcgacggctgcatccgagacgcccgacaggctcgaccaggagccttcgtccgccttccgcctgccggccgagcagcccgtcaccgagcaggacgacgacgctgggtcgaacgactcgccctcctcgtcaggcgtgaccgcctcgccctcgaacttctactcgaccctgcacgccaacatcagcctcaccttctcgtttgaggagcggctgtcgcctctcaccaagacgctcgttctgccgccgggaattgtgtcgccccaggtcgattcgcccatggccgcaacgccccaggtcgattcgcccatggccgcatcgccccaggtcgacggcaacagcctctttaaggtggacccgctgcccgacctgagcccacggccgctcgtcagcacctacttgctcgcaagcgccggtcggccacctgcgtcctactttgaaggcctccacgagaagcggacgacggggtctttcttggccttcgacgcggacgactccgacgtctcggacgccgagagcgatctcgactgcggctcgcgcctgagtgtcgtcgagattgcgaccggtcggcgggtcgagctccaggtcgctgccggcagtcagacaccgccgcccaagggcacggccgtcttcgatcactcgacccctcggccgattcgagtgcgcaacatgagcgcttttgccgacgccgatgacgacgaagacatggtatacctcgctcaaatggtccgcgtcctcccgacgccgcagtcgagcccaactccggcagctgggcgtcgggattcgcaacacgccctcatcgtcgacgaggcggccgacaagctcgacctctcggcctttggcttccctcggtcggtctcgaccacctcgaagtccagcactggccggttcgacaagccgttaccgcggccgccaaagattacccggcttcggggggctcagagttcgccggccaccacgccggacggctccgcctcatcctcgtcgtcgtctagacgtatggcgtcgtacctctcagcaaacgagcggccgaccagcgcaatcagcagctcacgctctgtgtcgcccttcacccccttggcggccggccaagagcggcggttctcgcgcggccctcggcaaagcggcgcctgggagccggcatggggcggtcagcttgctagatcctcggttggttcacccaccacctctcgttccagcagtcgtccgacttcatacatctcgcgcgctcgtactgcggcaccgtcggcggcggacgaccccttcgatttcagtccacgcaagccgtcggccgctctgtcgcttcccgtcgccgaagacgttttcatccagcaggtcgacacaaaggtcaagcgccgcgccgccatctccgattcgccaacggcccgaccgcgggcagtctctccgaagctcaagcagcaagagcggcagcgcaagcccttgcccaaactgccgcaccagcagtcggacacagagcgccggtcgcccgtccttctgcaggagcggcagcagaccccggaggtctgccattgcccgctgttcttccagcgcgtcgacggtcgacgagtgcccgtcgcccacccgatgcacccgccgccaccgctcccaccgaccaaccacaaacggccggacccgatcctcagcccaacagcctcagctcggtcgacgatccacgacccgaggcggtcaccgattcgctttgccgtccctcaaaaggccgccccggccccgttccgaccgccgatggcgtcgaggggcgtgcagtccgagtcagtcgtcagccgcgacgacagcggccagctccagagctcgtcacccgacatcaagaagcgtcggagccgggccgtcctcagccgactgttcaccaagcgcgagaagcccatctcgacctaaagaaccctcccttcccctgtcacggaatccgtccccctctctcttgcgtgacccttactcctctttcttgcggaatccctttactctcgaatggaacccccttcgccctcgcctctcctagaacccctgcgtcctcacctctctcggaatcccctcgcttcttccggaacccccctctccccgccttacgcctcctcgcccccccccctcctgcatcgccgctcgcctctcgtcgcctcggcctcctcctcttcgctccgcccgcctgccgtgccgccctctcgtccgaaccgagcagaagttcgtcgacccggcccagcaggccgaggccgaggcctcgcagaagaagaagccggcggcgccgaccgtctaagccgggagagacgctcacgatacgaaggggttgcgctcagccgtttgggaggggggtcgggagaggcaaggagggagatgcgctccttgtcgcctcggagcaaggacggagagcacgtaagataaaaggcatccagtgacttttcttcgacttagaccaggccggccgagggagcctcaagcaaagggcgttcgcttgcttgtcgtcggaaggcggatgagggtgtcgaagggtcaggccgtcccccttgagcggcgacgacgggcccagccgctggctcaggtgcgagcgcaaggaccgggcgagatcaacggcatctcgagcaacagactgcggtatctttcgcacatgaggcgccaagagggcgggcacgagaggagactgtcgttcctggacggaagaagcctctcgcaggttgccggccaaagaggtccgctttcgtttgccagccagctcgagggtcatggaaaggcgatcatagaaaatacgtcccttactccctcggacaaccaacaacagagggggagacgaaggggacgatacggggtgtgatgatgcggttacgttgcgagcagatgcgatgttgcgaccttggccagaagacctccctcctcaccaccaacgaagaacgggagactgaagcacgaggagggaagcaagacggcaggcaagcaagcggaggggcggagggcggggcgggtggtggagaaagggcgagcttgaaggggatgtcgggatcggtcgtgtcggtcgggccgcgatgggggtccgagtcgagggccgtttacgagctcttgttggcgcacgagccgcacttgcactctccgggggcgcactggcaggtcgaaaagagcagaacagaagggtcagaccgagtaaagactgggaagggcagggccgccagggctagaggaaaggcgggcgtcgcatcaaagggagcgggagggacgaacggtgcaggcgccgccctcgttgccgccgcacgagcaagccttggcatcagtcgcctgcttcggggcgtccttgacgcagttggtgcacttgcactggccgggagcgcactagaaggggcgtaggaagacagcgggcatcagaaatgggcctgtgagagggcgacaggagcgggacgggcgggccaagacggaccttgcactcgccagagtcggtggaggagcatctgcgggagtgagggcggacgtcagcatacaggacagcagggagggtcgtcgagcgatgagcgacgcacgcgcaagccatcttgggaaaggtagagtagttcaaagaggtgaggtgaaggcgggagaaggtggagatgatggttgggcgggagacggcccggatcccttaggtttttatctcgccggcgggagagggactttgaggcacatgatggacaggccgcccttcgctccagctgagagctcatccggctcggacgtgcatcgcaagaaaggccgcctgctggagcgggccgtcgctagaatcatcgagctgccatcgtctgggagcccgtctcgtggcaccatcatctggctcgtcgccgccgttcctccgcctcggtcgccccgacggtcctctgtctctgactcgtcttttagatctcgtccggatgatacttaagccactcctacgcgcctacgatactcgagtcagacacaactctgctggcggagatgacgcttgccggccgttttatctcgctcaagcgcccgaggtcagatggcttcccacgcgcgcggctcgctacagtaggggctcgctccgaacgaaaacgtcggccagcccgtcgcttcttctcgctccctaccatcacccccaaccatgcccactctcacgctctcgcagactgcgactccgttcccgttcgccctcctcggcgcggcttcgttcgccaacgcccagcttggcgccgacgtcgtcgtcgagtgggagcgcgacagccagaccaagctcgacggccaggcgctcagcgacgacgccgctctcgccaagattggcgacttgctcaagggcaaggaggtgagtcctacgagctcggatacgattagatctgtgtgcgacagctgatcgttgcattccgcggcctggcagacgtcgtccccgaccctccccgcaccgctcgcacccaagacgccgttcccggtcgtcaaccagatcttcgactccctcgacgacttcctggcactccggtcagtccctgctgcatgccgcttacctcctgtgacacaaagaggctgatcttgctctcctctttcgtctcactgctagcaccttctttggcggccactcgctcggctcgaaggactttgagctctggggcgccattaagtgtacgtcaagctgccagcagactctagcacttaggcaggcaagtactgacagtcgtcctctcgcttcgcagccaaccttcccgcgatcggcatcataaagaagggcctgcacgcccacctcgctcggtggtacaactacgttgagcagctgccgtcgacgactaaggcgatcgcctcgctcagcgaggccaaggccgacaaggtcggtcctgaagcctaaatgcagcaggcgagacgctaatcagtccctcgccgcgttcccttccagggcactgccaagaaagccgacatctcgctcgacctccctggcgcgtacgacggccaggtcgtcacgcgcttccctcccgagccgagtgggtacctccacattggccactcgaaggcggccctcctgaatcgcttctttgccgacaagtaccacggcaagatgatcctccgcttcgacgacaccaacccgcttaaggagaagtccgagtttgaggagtcgatcaccgaggacctcgccctgctcgacatcaaggccgactcgatctcgcacacgtccgactggtttgacgagctccacaagctcgcgatccagctcatcaagagcggccacgcctactgcgacgacacgccccagatgcagatgcgcgacgagcgcatgaagggcatcgcctcgggccggcgcgagagctcggtcgaggactcgctcaagcgctttgacgagatgacgctcgggtccgacgagggcacgcgctggtgcctccgcgccaagatgtcggtcgacgaccccaacaaggcgatgcgcgacaccgtcatctaccgctgcgtcaaggaggcccatcaccggaccggcacaaagtacttttcgtacccgacctacgactttgcctgcccggttgtcgactcgctcgagggcgtcacgcacgccctccggaccaacgagtaccgcgaccgcaaccctcagtacttctggttcatcgacgctctcaagctccgggcgccccacatctgggacttttcgtgcgtcgaccgactctttggtctgctctgcgctgagtaaagctctcagcctgacaactcgttgtccttcttccgctctcagccgtctcaacttcgtctacaccctgctctcaaagcgcaagcttcactggtttgtcgccgagggcaaggtttcgggctgggacgatgcccgcttcccgaccgtccggggtgcgtctttccgctcgagcgtccgatcaggcggcccgactaacccttctctcttccgcaggtgtccgccgccgcggcatgacggtcgaggccctccgcgaatacatcatttcgcagggcgcgtcccagtcgcagatgacgctcgagtgggacggcatctggtcgatcaacaagcgcctcatcgacccagtcgttccgcgccactgtgcgctcgccgagaaggacctcgtcaaggtcgagattatcggtggccccgcggccgaggagtccaaggcgctgccgaagcacaagaagaacgccgacctcggcgacaagacgaccttcttctcgtcgtcgatcctggtcgagcaggtcgacgccaagtcgtttgacgacaacgaggaggtgacgctgatggactggggaaacgcctttgtccgctcgcggaccgtttcggccgacggcgtcgtcaccgctatgacgctcgagctccacctcgccggcgacttcaagaagaccaagaagaagattacgtggctttcggccggttccgccgccaacacgctcgcgcccgtcaccctgatcgactacgactacctgatcacaaagaagaagcttgaggaggacgacaaggttgagaacctcgtcacgcccgtgactgaattcaaggaggccgccctcgccgacgccaacattctccgcgacgtcaagtcgggcgacacgctccagtttgagcgcaagggctactacatctgcgaccaggagaaggaggccgacggccggcttcgtttcatcttgatcccggacggccgggcggccggcgtcgagagcaaggccgtcgccgcgctccaggcggccgagaaggcggctaaggcggccggaggcgaggccgtcaagcagggcaagaaggctgtcaagcaggccaagaccgccgttgctggcgcggttgacgccgctcagaaggctgtcgccggccctgctgcgacggccggcatcaaggtccacaagtcagacatcacctcaggtttcgacattccggtctcgacgacggtgagtcgcgcgccgtgcattgtggtctgttgcctcagctcgagtcctgacgcccgtttcttcctcagatgtttgagagcaagcgcatctacggcaacgaggacctcaagatcgagacgccgtcggccatgcactcggtcacgccctacacccagctctaggcacggaagagatctcatgatgatttagcatcgtgcgagcggcgagcggaggtcatgtgcagaatgaaggcgggcgtgagggtcgtagagtgaggaggtgatgcgaaagaacgtgggaaaatactttttatcagcgagcgatgtggtgctgagaaggaatgatatgaaaggcagaggatcccgaaaaaagaagaaggacgggatgaatctgaacagaaggttatgcctcctcctcgtcgcgccgacgaccgacgagggggaccgcctcgtagcggtcttctcggtcggcagcctcgcggtgggccgcctttgcgcgccagctggccgggaggatgctgaggtttgaaacgatcgaaaggaggcccgacgaccagagtgacgtcgagagggagccctttgagctcgagcccgacgaacctccgcgggtcgaacgagtggccgaggtggagaggatcgactttgacggccgctgccaccactgcgaagccggaacaaagcaaaggggtcagcgcctcctggcagtgagctcagcgctggcatcaacaacggtcgtaccttaagggtgagcgagctgacgacgacgctgacgctcgacatggccatcgcgctcgccgccatcattgggtggaggtggaatccccacggaaggaagaagcccatcgcgagtgggatcatgaggaagttgtagatgcaggcgaagaccaagttggtctgcgggacgagggtagtcagcggctgcttatgaggtagcaatctagcgcacgcaccttgatcttccagacgatggcccgggcgagggcgagcgcggcgacaacatcgaggaggtcgcttcgcatgaggacgacgtcggcagcctcaattgcgaccgaagtgccagacgagagtgcgatcccgacattggcggcgactagagctggagagtcgttgataccgtcgccaaccatggaaactccaccctttcccttgacgaggtcgctgacaatcttggccttgcccttggggctgacctcggcccagacgtcggcctcgtcgatgccgacctcgcgtgcgacagcgcgggccgtgccggcggcgtcaccggtcaggagctgaacggcgatacccatgtcctgcagggcctggatcgcctggaccgacgatggcttgagagtgtcggtcaggctgatagccagcatcgggatgggcgaagtcgtcgagctgaaggaggccggacgggtcggcgttgaggggacgagcgagacaaagatgacagtgttgccctgcgacgtctgggccgcggcaaactcgcggagcgcacggggaaggtcggcttcggccgtcgcgttcgagccttcgtgcttgtcgtcatcggtgctggccttcctaccgccggcatcgcgcttccgcgccgaggcggccggcgactcgagcacgaaggaagccttgccgatcttgacgacatagggcgtcttgctgccgtcatcctcggccgtgacagaggccatgacgccttgtcccgtgaacgactcgaaggcgtcgatgtcacagtcagcgatcgtccggccgtgcgagcgaagcaagaggcggccgtaggtcgagatcgccagcgcgagaggatgctcggaccgggcttgcgttgcagcgacgagcgagaggagcacgccgcgagtcagagcaggaaagaccgtcgtgtcgacagggatgttgagcgaggcgcgagagacgagcgttggagccgagccagtggcctcatcgtcctgctcctccgactcgtcatcgtcgacgctggtctcgggccagcgaagactgccgacctcgagctttcccatcgtcaccgtgcccgtcttgtcgaggaagacggtccggacagcgaccatcgcttcgagcgccttaccacccttgatgaggatgccattctgggcgccgacgccggtgccgaccataacagccgtcggcgtcgcgaggccgagcgcgcacgggcaggcgacaacgacgaccgagatagccagcttgacacaggtcgacagcgtcgtcgagccctcggcgcggaagaccatcggcaggctggtgagctccattacccagcacgagaggaccatccagccgatgaaggtcgcgagcgagagggagacaacgacggggacaaagacgccggcgacgcggtcggcaaactcctggatcggcgccttggtcgtctgagcgtcctcgaccatcttgacgatctgggcgagcgccgtgtcggctccagcccgggtgatgcggatgtcgatcgagccgagaccgttgaccgtaccgccaatgacatgatcgccgacgactttgagcgcgggcagagcctcgcccgtcaccatcgactcgtcaatcgagctcgagccagcgacgacctctccgtcggccgcgatgcgctcgcccggattgaccttgacgagatcgccgacctggacccactcggtcgggaccttgcgctcctcgccgccgttggtctcgtccatgagcgtcgcgctcgagggtgtcaggctcatgaggtcggtcagggcggccgacgtcttgcccttcgcgaggttctcgaggtagcggccgagcgagacaaacgtgatgagcatcgttgacgtgtcgaagaacgtctggggcgtcgtgtagggaccggaaccgagcgaggcagcggtgagcgtgccgagcgagtagctgaaagacgtcgtcgtagcgatgacgacgagcgtgtccatcgtgctggacctgcgagcggagcatggacgagatctaggtcagacaacatgtcggcatcgccgtcgcaaagcgacatagaagatacgcacctgtgcttggcggccttccaggcattgacgtagaagcggcggccgagccagacctgtaccgggatcgtcaggctgccttggacgagatcgccccagctgacggcccggaagacctgtgcgtcgactgcacccttaagaccgaccctcggcgcgaccatgccgacgacaaagacggggacggcaaacgcgagcgaccggtaaaacgtgcggcgccactcgccaatctcgcgcgtcttcttgagcgagtcgagctgggttgggttaagcggactcgagacgacggcgtcgaggccgaggccttgaatggcggtgacgaggtcccgcagcggcgtcaaggtgggcgtataggtgatggcgaggagtgaggcccggccttcttctgggaagctcaggtgctggacgccaggcagggcgccgagcgtcttgagcaggggctcgaggtcgacggtcgacgcgtgctcgggcaagccgtagacctcgacgttggtctcggctgacgacgacggcgggaggacaaaggcgtcgaagccgatctcgccgatctcgtcgacgaccttctcggccgaccagccctgggcggggtcgtaaaggacgatcgcccgctcagcgaggagagcgaccttgacgctgacgatgccggggaatgccgccagggcgccctcgatcgcagcaacacaggcgccgcacgtcctagagggaacggtagggcaagcaaggcaacgagtcagctagatgtccatcaggaggggttgcgcgaggcgagctaacgagttcgagcgacgactcacatgccctcgacacgaagctcgacgcgctcgatcttaccctcgccctcgccgtcatcgccctcctcgcccgcgaggccgagcgactcgtaggcttctgcctcggccgggctgacggcgttgggcaggtggaccgacggcagcttgcggtgcttgccgcggctaccaggggagttgccaccaggcgcccgaaagaggctcgagaggggcgtgtcgaggaagcccatcgtcaacggcgagccggcgacgtcagacgcagtgttggggccaggaggacggttgctgcaggttcaagagaaaggagggaggaagctgattgagcgtcggtcgcagacggagggacagggacgaaagagagaccgccgcccaagagctcagtcagccccgccgcgcctgaggctcgcagagagcgacccctgtgaaacgcagaaagggggggacgagcgtgaagaggaaaatcgggcgcaatacgtacagagagagggggctgctgctgcaaagagaatcgcctgccacgacgaagacgatggtcaaggagggaggaagcaaagtccctcacctcgctaatctgtttgcgatttcggccaaagaggccagcgatctgcccgtgccccccaaaatatctttcgcaggtcgtcggccctcagcggccgatcatctcgagctcgtttccgtcgtcttaccgtcagctcaggcgctcgagacgcgtcgatctccgtttcgtcgtcgacgctcgccagcgccaggaggtcgaagagttcctacaacgcggaggtgaaaggctactacgaaagacagcagtcattacctaatccgagcgtaacttagatgtaacgcgccgcgcgcgctcccgggacgcgacgagctctcgaccgcgaagcaagagcaacagctcgtcgacctcaacgacctcccccaaacctgccccctacaaccacccacagagaaagcagctacgcggatggctggtcttgatacccaccttcacgatctggtcgagagccaggtcccgtcgttggccggccgcgagcagggggaactgaccgactacgcccggcagctccttttgacgtacgtcgctttgcatccatcgccctcaatcgacaaccgacgcagtctgacgcgcttgatcccctctgcagtcgcttcccgatgaccaagaggccgtacgaccgatcaattcaggagcggatcaagaagcacttgctcgctcggcccacgccggcggcctcgtctgcctcctccccgcacgcctcgacctcgaccttgacacccaccgaccgcgcacttcggttcaccaacctcgctcgtcggctgcccgatccattgatcccgtcgacgtcggcctctgctgctgagtccgaggggggtttgcagcggatcgacgaggtgctcgagctcctcctgttgctcgcgccgtctggctcgagcggctcgtcttcccttcagccagccaagccgttctttggcctctcgagcgctcctgctcctcagctcgagcgtgcacctcccttgatggagccaccacggccgagggtcggcttgccggatcacccatcaagaagcaggaatcacactgggccgccggcgtcggccgccgtcaagggcaagggtagagcgatcagcaaggcgaagctgctcgaggagtggaactcttcgacaggtgcgggccttcgtcgctgcttatcgagagggaagcagctgacagccgctacctgtgcttccgactgacggctgcgccaggcaagaagccccttccggccgagacgctcctgcgcgagtcgctttacctcctgcaaggcatctcgggtgtccacatctcattcgcgacggcaccggctgctcagcccaacccgtacctgctaccgccgcatcatttcccgtcggctggactggcggccggtgcgagcccgcatctgtcctcggccagctttgaggtcgacggcccgatcgacgacgttgaagaggccggccagctcatctttcacgacttggctgagggcgggaccgtctcgggccccgttcgtggcttacttcgaggccttggcgagacaggctggctcgtccgcaacgtcgagacctttgtgcgcgaggtgcaggacgcagcgagcacgggcggcggggccggggacaaggcggcggacggcagtgacgtgcggcgaggtggcctagtcgagcaggtgcgtcatgcgaggctcttacgctctcccagaactctttgctgatttgttccgctgcgctccctcgcagagcttgtgccactttctccagacgcagctaaccgagtactaccacctgatctcgatcctcgagacccagatggcatcctcgagcggcgacgcaaaggacgactcagacggggtcggcatcgatggctttgagccgggtgagggcctgacgcttatgcggctcggcgtctggacgcgcgaggcccggctcaagatgcgtctcatgagcctgatggtcgacgactgccggtgtgcgtattcacctttgacgacgttcgcgccctcctttagctgacttgataattttgcctcagcatcgagcgggggccagctcgtctcgcgcatccacgcctacaccgagaatggcgacccgtttgcccggtccttcaccgactcggtcctcgaggaggtctcgaagcccttcttctactcgctctcgcagtggatctaccacggcgacttgcacgacccttttgcagagttcttcgtccttccgaatccgagcctcgtccacacgagctacctggcggcgagctcgactctcctcggggctgaggacctcggctttggcggcggccgcgagggcgagggcgaaggccgaggcgagggcggcgtcaagagctgggagctctggcgacgcaagtgggagttcaaggacgagatgcggccgagctttgtcagcgaagagtttgctcgcaaggtccgcctgcacccttctctcttcctgcaggcgctgcggctgacgcctctgatcgctccacagatcttctcgaccggcaagtcgcttaacttcatccgctactcgtgccaagacagcgactggattgcgactcgagccaagctcgaaaatgccggcaaaggtcgggcacggccgctttatcgtttttggactcacgaaatactaacgcctgcttcttctggcctcccagtcctcaagtactctgacatcgccggtctagagcgctcgatcgatgcggcgtacgagatcgcctcgaagcggctgctcgaaatctttttcgacaagtttgagtttatgtatcacctgcgcgcgctcaagatgtacctgctgctcgggcacggcgactttgtcgactcgctcatgggctcactcgcgtgcgtcaaaacgtcgtcctaggttggaggctggccgctgaccttcttgcttgctcctgttccagaccggacctgtccaagcctgccaaccagctgtaccggcacacgctgacggcgacgctcgaatcgtcgatccggtcttcgaacgctgcgttcgacccgcctgcggtccgacggcggctcgacgcgcgcatgctgccttatgcgcacggcgagagcggctgggattgcttcgtgctcgactacaaggtcgacgccccggtcgacactgtgctcgatccgcggacgatggaggcctaccagcggatgtttgtccacctctggaagctcaagcgggttgagagcgcgctaagcgggagctggatgcgtctcgtcggcggcggcaattcgcgcgggtccagccgagcgagtgcgtcccctctgcacttcctgcacacagcttgtgcacagggctgaccgaggcccaccctgtcgcgccagactcgttggccgactggcatcaggcccgcgtcgtccatgccgagatgctgcacttcattcgtcagcttcaggccttctaccagctcgaggtgatcgagtgctcatggcaggcgtttgaggagctcatcgccaagaacgaggacggcctcgatggcctcgtcaaggcccatcgcgaatacctcggccggctgatgacgcgcatcctgctcgtcagcacctcgcggaccggtggcacagaggttcgtctctgcaatgagtcccgtgccgtcgttatctcgctgacggtgtcgcacccaaaggatgcgctgttgcgcaaggtgcaggaagtcttccaggtcatccttgacttccggacggcgacggtaagcaggtcgtcccgcgcttgactcgccggcgtcgctgagtcatcccccctccttgctgccctccgcaggagacactctaccgccacacgctcgaggaggaggttcgcaacgactcgcaacgcgactcgcaacgagtacgtccgctgccaggcctcgacgctgcgatctgcttgctgaccgggtctttttggtcctcagggcgtcttcacccagtcgactctcccatcgcttaagaagaatgtggcagagctcacacgcgtcagggcgcagatcaaggaccttagtgcggcgttccagaatggcgtcaacggcattgtcgcgagtgccgcagcccgtgcgtgccctttgagcctatagtgccgatcaacttgccacgctgacggatatctttcgcctgctcagaccccgacccagaggtcaagctgctcgccatccgctgctcgtacaacgccttctacaacctccggccaccgaaggagcggcggaaagagcggtctgagaagcactgacgagcgcgggggtcgtccaggacgacgcgcatctcatgaatttacgagagccgcgaccccgcctacgcttgcaaagacaacatggtcatccgtagccggccagccgcgcccagcgctccctgatatcggcgagaaggacgcagaggcctgcgctgttgcgccggacgcggccctcatcctcaccgccctcgccgaggacgcgctcgccccgctccgtctgctcaaacacgagctgtccccactctgcgataccgagcacgaggccggcgtggtcgacgatgagcgtccggccgccgtcgaggtcgcggctcgcgtcgagaacgacgacggcgagctcgagtgcggccgccaggaccgagacttcgccgtcgtccatcgagctgccgccgccggctggccgtgcggccgctgcccggccggctgtcgtcaccgcgagtcgcaacgtttctggcgcgatggcggcgaggaagagcggcgagtggcgggcggcatggacgaggaccgacatggtcgcgagcacctttgacagcgcgagggccgagaggatcatgccggcgccggtcgaggtgtagcgcgaggccgatcgggcggctttggcgtcctcctcctcatagtggagccagaaccggccgatgagtgggaggatgaagaactcggccgcaacgttcttgtaggcctcgatgccgagctcggccgccgacggaatcgcagccgccgacgacagccttccggctggccgcttcgagaaccgcttgacgcggaccgtcttctcgcgctggaactcgaccagctttgactctgcatcctcacgcgaccgctcgatggccatcgagctgagctcgccggcaatgagctcgactggccctcgaggaggagcccccagcagccgccgtgggttgacgtccgcaggcgagacgtagcgttcgtgcagccttggcggcagccgcttggtcggccagtcgaccgaggcagtggtaggcgcggtgattgtcggcagtccagcggcctcgcgtgcgcccatagcgagcgccgtcaggatcgccgaccgctgctgaagcgagtactgattgacaaagtactgctcgatgagggcgctacaggggggggcaaagaagggtcagtcttctcctgcagatcaacggcgggagcgaaggtttctctatataacgcacggagcagtcttccgaggtgagcaggcgacgagcacgttcaggatgccctgcttgcggtcatcgaagtcgtctagctcaaagttatcgttgaggccggcgagcgagagggcgacgtagacggcgttttcgtctgcgaggagggaagcctcgctgtcagctgcggcgtcaacggacagatatcagacggaggacgcaccgatctccatgccgaacccgcgcttgcgacggacgaggctttcgccccatttgaggccggcctcgagcttgtcagggtcgtctcgactgctgagcagctcgccgagttgggcgagatagaccggccgcggtaccttctttttcttggcgttgtagagcgtcgggtcttcgacaaactcatcgagatccgacggcgatggcgaggccgaccggatcgacgaggcggacgacgatgagagatagcccgtgagcgagtcgtccgagtctgagagctcgaccggcgccttgaccttcttggccttgcattcaagcgacgagcaggcggccgcagcagtatgtagcgcgttgtcgcggagcgaggttgaacaaccgcctgtcgaagcggatttgagcggcatggccttggacgcctcgctcgacctccagcccaacgacgaatcgaggtctgccatcgccggcgcccggtcgaccgcgagctcccggagccgcctggccagacgcttgtgaggctcgtcaccctcccacagcccaaagtcgagcgtcttgcttccagaagaagctgtgagctcgctaacgacctcggcaccgagcataccgaggtgacggattacccggtccggatgcgagaggtagtgggtgaggccgttgaggaaggctggtgaggtggcgacgcgctgcaacgtcggcgactgaggcgggaacgaccggagcaagagcaggaagatgatgaggatgtctgtggaacagagcgggctcgttgtcagctttggccgaagctaggctcaaggagagtgtgtgacgcacacgtgtgcttggcgacgagcgagaatttgatgaactgcagatcggtccagagttcgacgactttgatcagaaaggctgaaagggctgggaaggcaaggaaggtcagtttgacggccggcgcggagggcttgaacacttcgacagaccacgcacccttctcgtcgcgcgccggtcgacccacccagcggacgccgatccgcgcccgagcctcaacggccgcatctcctccagccaagctgactgcctcgacgccgagaatgaccttctcggccagctgaggctcgtcctcgattgcaagaaggacgtgcatcacgtcgccggctcgtgcacaggcggcctcggagaccggtgcgtcgcccgcgaggaggccaagcaggaggtgtcgaaggagagactcgcccgtccgcgcgcggtcggcaaaggtcgatccaccgccgtctccgccgcttaagatatggcgccagccaagggtgtacgcgtcctgtgcgacctggccggaacgggcgtcgtcgctgcagcgagcgaggaaatgtgggaggaggaccgaaaagagtgtgcttggtctctccagagcgactgtcgtcgaggctgggatggtcgagggagacgcatacccctggcgcaggagcagctgggtgatgaaggagaggggtcgccggtcgactgagggagagtaacaggtcagcgagctggcggcgacgcgagccgggttcgtcgaaacgcacgctgctctgcgccgcttctgccctcccaaagaagctcgtcgacaccctcgacgatcgcgctaaagatgctggcctgctcgagcccaggcggaatggggtaggcctcgccgcctcgggttgcgttcgcgaccttggccgggaccgagacgagtgcgcgtgcgtaggtctcccaggcgaccgcctccttcgcaggccagggcgtgcctaaccctgcgccggttcccgagccgagcgcgcgataggtccgaggtagagggtaatgttcgacgagccgggcgatgagcgggatggcgaaggcgagaggagcagggctggacgctggcatggccgaaggtcctccggcgctggccggtcccgaagttgaggcggcagcggacgactggaggaggacctgcaggcccgacatggcgaggagggctgccgcctgacccgccgtcttacttccagccgacgagctcgggcagaaccaggcgtcgagcgcctgccggacgagggcctgctcgccatcgtcgtcgtcgaggcctgtcgcccacgcgccggcgagctcaaggacggccgcctggagcgagccgagcatgcggccgaggaggatgcctttcgcctcgaaaccccggctcacgccggctggccagcgccaggcatcgtggttctgcgacgttgcgagagcgaccgggaggagggcgagcaggtcgagcggcgggcagacgagcgcgaggacggccgacgccgacgggaccggctgccggagggcgtcgcgcgttgctcgcaagagggccgtcgcctcgtccccgttcgaagacgcatgggtgggcatgcgagacgagggaggccggttgcggtcagaaatatgccgcgttgtgcgtcttgatcgccgtcgaggtcgagcttggacgttggacggcaaagagcagctcgtcgacgtccccttgctctctcgccgtcgcgtcccctttcgccgagccaaaccaaacagaggcggccctctctcgtcctcgaacagtcatctcgctcctgtcgacgctgtcactcgagggagtggggacagggcagggtcgcaccggccaggaccacaatgcaagctgacgtctattcaccttctagcacacagtccacgccgcgcgagtcggccggcttccaggactcagccctctgggatgccctgtcgccggcctcgcaaggacaacgtccactgcactctctcgtagcgactggccctcggtacgacgagccctctcggcgtagcagaccgctatcgctttctctgaacggttgacgacgcttgactttgagactttgagacgcggcgtcgacgacgacgttgccctcgaggctggtcggagttcgctgccagagcgagagaccgtcgtcatcctgcgagtcgacggcaccgagcggtcgctgacacgagccgcatcgcacgctcgccagagcgatcagctcacaaggcgacccgcttgacctttgcccgccacctcgttcggctcccctcaccctcttcgcaccccgacctcacagcccggcatgaagcgctcggtgctcatcggcctcctcggcgccgccctcgccaactccgccctcgccgctctcttgccagtaggcgtcccacctggcctcctcagccatcgccacagcgatgacggcgaaggtctcgcggtcgacacggccgccacgtccacccagccctcggtcgacacccacgtcgaggcgcacgagcaagggcacggcgccaactcgtcgacggtggccgggtcctttgacccaagcaagctctacggacccgagggcgaggtcatggagccagtcccgggcatcaacgccccgccctcataccaccaccaccagtcagttcgcccttcctcagtccggatgcgcagtcgtcctctggcctgcgtcgctaacccgccatgccgagagcagcggagcgatggagccgtcccgagttctcaacgagacggccatcctcgccggtcacaatctcaacccactgtcgtactgggtgcgttctttttcttcatcagagtctgcgcgctcagcgtctgaaccgcctcgctgagccttgcttgcactgcgcacgctcgccagacgcacgactttgtcttcaagtcagacgacgagcgcctcggcggtgacgggcagcacggtcgctggatcgtcttcggccacggcctcgtcatggtcgtcaccctcctctttgtccttcctcttggtgcggaaccaactctcctatcgagagcgcatacactccttctgaccagcccccatcctcctccctccagccctcgcgttccgcaccgctcggtcgtcgctttacggaccgacggtccttctcgttggcatactttcttctacttctctcatcgcggcctgggtgtatcgggcgcgcacgtcggacctgtacgctcacgagactcatagctcgaccggctacgtcgcgctcagcctggtctacggtcttggtgcctgggacctcgctcgtttcctacggcctggttgctgcggcgcgactgaggggtgggcaataagcgctcgggcgacactctgcgggcggcggtcggcggaagcggccgacgcgcggcacatctccggatactctgctgtcgacgacggagagccgaaggaccgcgctcccgagcatgggctcgccatcttccggatcgccgatgacgatgaggacgacgagtgcgcatcgccggcctcgaacacgcgccgacagctgtcttcggtcgagcgctcgactccgctcgcggtagaacctggccgccagttgtcggcattcctcgctgcaggagcctcccaaacgtcttcgacctcgaccctacatcaccaacaccatcatcacgaccgcagcgagctcgttccgcctactctcgccggcctggcgccggccgagccgactctctcgtacgcgaggcagcaggccgagacgctcatcggccgcctcgctgtcgtcctcgggtttgcctgtactctctcaggcatcgccatctacgccggtgcctgccgggctcgtgcgtccgcttgtcgctcctttcccgcacacgtgagctgacctaggttgcgctcccgacagagtacctcaacggctgcctcgcacacctcatcaagggcggcatcttcttcggctacggcgtcctgacctgggctcgctaccttggcgcctggcaggagtacgtgcgcgcgctgcgacgtcgccttacgtcggcttgccctgactgaccgttgctgtcgcgcaggtacggctgggcttggaatgtccgcccgcgccctcgcttgacggcggccgatggccgcaaagccctatcgaacagccagtggacggtcccaaccgccgagatggtcgagtcagcggtcatctgtatctacggaatgacaaacacgtggctcgagcgtaagtatctggccggcgctgcccggccggatgagtggccggcgctgcccggacggaagagtggccggctgaatcttgaccgtcttctgtcgtgcaggtctcggcgcgaagaccggagcgccactgacgatccacgaggtccagcacatctcgatcgcgctcatgttctggttcggcggtctcctcggcatcttgctcgaggtgtcggcggccagacgcatcctttccgcggccgtcctgcgacgcgacggtcggccgcttgccaacgtgcgcaagccgccgagctggaccggcagcttcaacccattcccggcgctcgtcatcggcgtcaccggcctcgcgatgagcgcccaccatcaggcgtacgtcctcgcgatcgaggtgcacgcgctctggggcaacctgctcgccatctttgctgtccttcgcgttgcgtacgtcggatcacctcgatgaccttgccagaggcggaaagctgacacccaaagatcatcacagaacgtacgtctttctctggctccggccgccgcgctcgatccttccctcgcggccgccgacggaggctctcgccgcgttcagtctctgtggtgcgtcgccgtctccattaacgcttgctgcgatcgaagagaatctgacctctccttgtctgctcatgccagccggcggcgtcgtcttcattctgtcgacggagcaggtcgtctatggcgccatgcgctccggctggggtgagtcgctttacctcttagtctcctcgcgtagcgcagctgctcacatgacgcccgtttgcagactccatcatggccttcctcaccggcaccgtctcgctcgtctcgatcgtctttgcttggtcgttcgtcgtcttcttcgcgaaagggtgggcaaccgagtaccggctcagcaagcgctctacccccggcgccgactcgggccaggcagggagcttcgacgacctcgagtcatcagcggagagcacgctttctgactaagcctcggtcgctcgccaatccaacaagttgtgcaacgcccttaggccatctatcctactcgatctctcgctgccgacccgcagcttaatgcagatgaaccccccatgcacacgtctcaaagcgccttgcccgcccagaagcgctcgaccatctgccgggctgcggcgggcttcactggagagcgcaagtaacggtgcatcagccaaaagagagcgcagcagtctcggaagggagcacgcactggtcgggacgagatggcccgcattgtggacggtcgcgtacgtgaggaggccctcgccaccggtcctgcaggttgacgtcgtgcgctcgtcagcaagaacgcaacgtctcgagagtgttgaggtggccgtacctgacgacgccggcgggctctttgctgccgtcgacgtaccacagctgctctgtcgcgttgcggtagcctgccgagcctgaccactcgaggcgctgcacccagcggcgcacgccggcggcgttgcaggcaaagtcgacgtcaccggcctgttgacgaaccgacacagggcgaggtcagcaacgactctggcgggcctctgccagattctgtcgaacagtacgaacgtagatcaacatcctgacgccgtgctcgagcaggctcgcgacgtagagcgttgtctgatgctggacgtcgagcgtgccggcgccggtgatgccgccgaacgcggcagcaatgccgtgatcagcgccccaaggtccaacccactcggggtcgatgccgaggatgcgcattacctcgggcttattgaggtaggccgccaagtcggcgctctgcacttcggtcgagcagctgcaaacagagtcgtaggtcagtgatgctgagtttgtagacctggcgagacgggacgacgagtacgcacccggcctcctcggagcagatctccgcgatgttataccaattacggcgaggctggatccgagcaaaggccatgatggtaaacgagctgcaaaagtcgaccgcgttgccacacgaggggatgtcaaagctggacagggccctcggcaagtcagcgagtggttcgtcaagggccaaagcgagccgttggacggaccggtcaatgcactcggcctggaacatttcgaggcagcgaggcaggagctcctgagcccgagcgcactcgccaaccgactggatcgggccgacgcccgagaatttcgtgcacatctgctcgacgtagccctcgtctacaggaccaaaggcacacagcgtttgcgtcagcatatcgaaggtgctggcgggtcccttagtcaatcacccacacattgtcatgctgtctgtccagccgtttccgatggcgacgctcttgagattcacgaccgaccgattctgggcagcggcatgatcgttgccatcgaccacggccgcggcaaagactggcaggtagcggcctccgtatgactcgcccgactgtcggatcacaaataaagtcagtctgagagctcttcaacagatgacaggcagcgcaccatgtggaaaggtcggccctcgaactccttgaaggtgctgaaccagagactgataaaggcctgcatgtcgatggccgcgccctcggttgtgctccggagcggctgaccgcctcgagaaaacgaaaagccgacctcgctcggagagtcgacaaagaatatgttggcgtgctcgttctggttaaaaatgcgcagtcagcgattgcggcagccaagcagcgtgctcggccgcaacgcacccacgagttctcgcggtagacgagctctcccgagtcgtggtcgacgctggcggaagagcgacatagcacgcgagtcagagcggacgccagaggcgtcgtgggacacaagactcacgagcacgggccgttctcgatgaagaggcccatcgcactcgaagctccgggacctccgttgatctacagaaggatggggacgatgagtcaggcaggacggcatcgggcgacggcgagagtgactgcgcacggcgcgcggccgcaggcagcaaccggccagggctgacgagcggcaccggccaagacagttacagctcgcacgtcggacgcacccagagcacgaccgggtcctccttgggcttgctcctcgactcaaagaagtagaagaagatggatttgccgtggccgtcgacgtcgatgtagccctgcggacgagcgacgcggtcagggcgtcagggcgctgtttggcccgctgatcgggaggcatggagacgtaccgcgtaagacctgcgaatgagagacacgagacgggcgagcgaggtcggaagaaaggaagaggtcgaacccgttgcgaaggtcgcgaggtcagctcctgtgatgggctctgccgcagctgatcgaccgacctccagcaaagcagctggcggggacgcactttgctttcgtctcgcaccagccggtcgtctccttgatgcggagcccgtagccaggcatactcgggtggcggaacgtcgtgtggacgtcgccgacgacggacgaggcgagcgtgtggtgccgttcggtcgaggaaaatacgcgctgcgaggtggcggtggcggcctggactgctccggccgcggccaggcctgcagcagcgaggagggcgaggagaaggctcagcatgctctgcctgtcttgctgtgataggatggttgaggtgcagaggcgatggtggttgtggctgggggatgggggtcgcttcgagcactcggcccatgcggcaagccgtcggccagcgccgaaagggtcgacctcaatcggatcgtatagctctgggctccattctacgatctggccatgctctggaggctgctcgtttgcgtgtagagggagggccatgcatcgagtccgccctaccgacagtgacagtgggggtagagcgggttgcaccgtcgaagctgccgccgacccagctgctgcgcgccgccgcgaacgacgacgttggcctggccccgtcaaggtgataacggccggggagtcggtcctcgacgagggcggccgtatggcccgagagagaggcggcgtcgccgtcccgcaagatgagagagtcgagagagagggcgatcggctatttgcccaagcgcgcgtcagggtgcttgagcagagcggcctggacgcccggatcgaccgactcggcgagttctccgttccggacgaggctgctggcgaaatcgacagccggccggaatcttggattcaggtataaggggttgatcgtctcctccaagccggatgcgaggcgagcccggatatggtgccttctctcgatgaggccgaacgcgtcggatccggcagggccgagctcgacaaccgctacggctgcggcccgccggtagacctggtgcaaaagaactgcaaggaatagaaattcgaggaggtccggccgagaggagggtttcgcaaaggcgacgaggtcgaccgcctttgccccgtcgaccagtggaggcagcgagtggccaggccgctgtcgaagcagatgaaggagccgtcgtagatgggtcccaagccgagcgcgatggagcgtaacgtccacaaaggacaccgcctcgtgcgactagcccaaaggagacgtaggctgggtcagttccaaggtaagggatcgaggctgatggcaaagggtaacgcaccagtctgcaatgggcgatgccggtcccctcgcgaacagagtcgagcttgttcaaaatcccttctgcggtctcgccctgtagagttagaccactgctctcggaccagccgggcccgatctccaggatccggcgttcgaccgcctgcacgagctcgggcgggaagctctcctcgggagggcggcaaccaagagagatcacgtgacccagggtagtcgggtcgaaaatcttcctgtcgagcgccagatgaacggccatcttgacttgcgcggctgatgagccgtctgggatccggtttagaaggtcgtgtatcgtgccgggccgcggaaggggcttgccaggaatgggctcgaacggccctccaggcgtcgacaggaattcaagggcgaagggcaccgtctccaggtaaactgatgatccgaaggagaaaagaaggaaagctatcagcctcaacatcagaacgaggaaggacggctgagcgggcggcgcacgcagcaatgaaattaaagttagcacgtcccgatagcccatcgcgaggaggagccgactccaccaccggaagccgtcgctgccctcgggagcgtcagcccgcgtgagaggacgcatccagaggcgagtcgcttgactgtgactctgagcgtcttatttagctttgctttcgagttgggtgcggcttgacggcagcgggagagaggagccgacaaggattgggcgggagaactgggtgccaagcttcgaggccgcaggccggcctggacaaggagtgaagagtcaactggccctcctctagtctgcgacagaacgcctccgagcgactcacctgctttaggagctcttgaactgcagggcgcaaaaggcgggcgcctgccgatggcggcggactggccggcggccgttcgagagcggcatcgggagggggacaggaggtgggcttggacgagcgctagaagcctttgggagggctgagcgggcttccaggcggtcggtaggtcgacgtcctccagctgccagtagatcgagcggatatttggcccagccgtcggcgaccggccggtcaagagggccgactgctgcgcctcgagctgaccgctggaggacggccgagggagggcggccgcctcgctcgccgccgacgagctcgcatgccggccgaggactggcaggacacgaaggaacaggtcagccgtcgcgtcgggcggtcgggtggcctgctgcgcctcaagaaggaatcggcagcgggaggacggaccaggcctggccgctggcgctgatcgagccagggcgcgacgggcgtgcgagacgagcgagcgcgaggccatcctgtagcgggcacaaaggggtgcgtgtgagagccggtgctggagcgagacgtgcacgtgtcggctggcagcgagcctcctcgtcccggccagatgaaaacggtgctcgaccggcgagaatcaactggagccgcgggccgttcgggtcgtcgtcacctacgccgtcatccgcgccccaccaactcttccccctccgtcgcctcctcgaccgtcccgcaagagaactcgtcatggcaagcctaggtccgtgtcgtctctggctcatgccagccgaccccgatcgaaacctccgactgacatccattctcacctcctcctcctcctcctcctcactctcacccgccctcacctgacgacgacccacgccgcaccctgctcggtcatccgcgcgcggaaatctcgccatgtgacgatcgtcccctttgtgcttccgtcggcccggccgtccatccacctcatcatctacagcagcagcagcagcagcagcagcagctccctcggccgtcgacgacgaagcctcgcctgccgcctcgaccagcggacccgtgccgtcaccgtcgcctattgtctcgcccaagtcggcggatgccgccgtcgcaccatcgaagacgacagcgatgaccgcagcagcgaccgagccctcgcccgcaccgccctctgcctcggccgactcgccagcgggaggaccgccctggctccctgcggcaagagcgacgtcggctcagccgccctcggctgcctcgtcgcggccggcttccaaggagcccggcgcgctccggcccgtcttcccttccaaggccttctcggctcgggccaagctgacgggggaggtcaacccgttcgagctctcgttctcgcagccgtcggccgtcagcagcccagagtttgcgacgacgctcgccagcctccaggatggcggcgccggccggacgacgcccggcgacgtcaagctgtcgctcccgccaatcggccacatcacgacgccgctcgaggagcgcgaggacttcacctggccgctcaacacgccggccatctcgtcgctccggtctggcctcgacgacgacgacgacgacggcaacgacgacggcaacgaccacggcgccaagggcagcctgccgacgccggcgagttcggccctcgtccagcatgccctgtcgtttgacccgtcgaactttgtccggactggcctgacgcccgggacgggcatgacgccgctcaccggttgcggcccggcctcgttcccgccgccgtcgcccaacacggccgcctttctcgccatggtccagaacgcgacggcctcggccgccaaccagatgggcggcgcgaccggccagacgccgagcggcgacggcggcctcccgctcatgacgccgggcacgttcaacaacgttatgtcgcagctctcgcagctcgaggatgggctcgacggcggagttggcgccggccaaggtcagccgccgctcaggcaaggtggtccgtcgcagcaggcgtcccgcgagcagcagcagcagcagcccgactacttctcgcatcggccgggcagccagcaaacacacatcgagcagcagcttgccgcaagcggtcagcacccccaccaccatcttcagcagcagcggtcgtccggcccgccggcttacagtcagcagcagcagcccgtcctgccgatggcagcccatccgaacccgcatccaggccagcacccaccgcacccgcaggcctacccgcacccccacccgtcgcagatgccgcctcagcagcagcagctccaccgaggggtgagcgccggcccgcctagcggcccgccaccccaaggtagctcggccgccgatggccgcttcggccagcagctccagcagcagcagcaacagcagtcaacgcaggccgccaatgggctctatctcctttcgcaagcccatcacgagattgcgaagcgcgagcagacggacggggggccgctgccgccgggaccagtcctcggccagccgccgcagatggcctatggaggtccgtccttgcgctaagctgtagtgctgttggccgaaccgagaactgacgcctccttctttgtctcgcgcatttcaggctacccgccgccgcagatggtgccctaccaccctggtcagctccagcagccgcagccgatgcacggccagcaccctcccgcgccgacgtctgcgtctggccgcaaagccaagcgcaagtcgtcctcggaggccgtgccgtcgtcggcggccccgccggccaagaaggccgcagcggccaagcagcagcagcaacgtggcaagaagcagatgagcgaggagagcgaccagctcgacgacggcaccggtggtggcggcggcggctcgctcgacggcctctcgcagacggacggccggccggagactgaggaggagaagcgcaagaacttcctcgagcggaaccggcaggcggcgctcaagtgcaggcagcgcaagaaggcttggctgaacgagctccagggcaaggttgaggagctgacggccgacaacgagagcctcgcccagacggtcgccaagctcacgaacgaggtccaccggctccaggcggccctcggcagcgccggtggcgggcccttgccccagcagggacagctgccgcctccgcagcacgtccagcaccagcagcagaggggtccgggaccgagcgtgtcgtcgggcatagtcggtgccgcaccgctcccaccaccaccgccgaacggcggcgcctacccgcctcagcagcagcagcagcagcagcagcagcagggaggtccgccgcctcggccgaacccgtctgcggtgtctcggccaaacccgaaccaacagcagcagcagcagccgtcacacccgccggtgcctcagcagcagcaacggcctccacacggccaggcggcggcgtcctcgtcgacagcgtcgacagcgtcggcggcgatgcagtcgggcggccctggcatgggcggccaggcgacatactcgtctgctggacccgctcagccgccgcctgtcactgggccgctcaaggtccgcgtctgagccggcgctgctcggccgcctcttcttcccctctccttgcttctgcccgctgcgctgatgctcgctcgccctcacccggggctcatcccccgttccgcgcctaccctacccgtatgttacccacacccctgcctctctcctgcctctttcactgctctgggtccttgtcttgccgtcctttgacgtgcgtcctcgagcatcccctttcgatttccttgagtcaacctcggctcgcacacacgcgctcgtcgtcctcttcatcttccatggccacctgccttgacgattgaagtgacgacagggggagggacggccgagattgtccgtgtgcgatcgaccgccgatcgtctggcctttgccagacaggagggggcggagatccggccgacaaaggggggccaagcgagagtaaaagaaaggggccagccggccaccgcgcgcgcggccttgacccttccggccctccgcctccgaaccttcttcctcttcgactttggcaaggttaagcggccagctccggcgcatggtaggctgaggcgagagaccgcggcaggctgggcgacggcccctcctcgtcaaccgctcgttcggcctccccttctagctctgtccctctcctgtcgccggctgctgccagctcgctccctctccccctcgagctcgaccctccagcgacgagctctggaggcgatggatccgagccggctcggacggaacccgatactcagtagcagcagctcctgccggccggccgccttccgcccgtcccctgcgccaggtgacgaagccggcggcccaacgctctgcgagccagcgctgagctcgcctccgccgtcgacgaccgaccagcccgccttcccgttcggtccatccgccgtcgcgatgccgaccgtggactactcgtccctgacaccgccgacgtcgtacgccaagctgtcgctagcgacctcagcattcccttcgcctgcgccgctgctgccgttccctcaggacgacccgacgccggcgatgctcgcccctgcgagaggggcacgggggacgtcctctgctccgagcggtgcaaagctcaagtatgtgcgatggtccttctcgtcgagatcggtcgcagcctgctgaactgcacgcccttcctctcgccaggacaaaggccaagcgcaagcgcccgacgatcggcaagccccagaccttcatccagaagctgttcgcccccctctctcagccgatcttgctctgcttcaaccgactgaccctctttcgttttccctctcagtttcgaggctctgtgagtttgagctcgccctccttttctgccgctggcttcgcctgactcgcactcgcccttgcctctacgagggatgacccggcgctccagaaggtcagctcgctattccaaccggagtgctcccgagctcgagttgttgctccgaccgtgcttgccagtcagacctacgctgacctgcagcttcgtttcctttctcagctgatggcatgggacgaggctggccacgaaattcatatctttcggccctcggagctcgtgtgtcttcttaatccgtctttcgctccgacgtcggtctcgccatctcgccacgctgacatgtgacacgccccaccgccgacctcggctgcagatggcctctttcgaccgaacgcaacgtgcgtatcttttggtctgcttgcgcgtgtcgacggctgctcccactgaccaaaggtcctcgcgcagtcttcaagcagacaaagtgggcgagcttcacccggtcagtctcgcccagaaagctcgttggtctcttttcttttctgacctcttctgacatgcgtcctcgcaggcagctcaacgtgcgttcgctcccatccgaggctgcaacgggctccacacccgccactcaccttcaaccgtaccatcagatctaccgctttaaaaagacgtcggcctacgaccttggccttcaagatggtcggaagctcgcaaccggaaagctcgtctcggtctggggtgcgttagtgctttgttctcactcgggcgtcttcgagctgacctcctatatttcgcgcagagcacgagactctcaaccgcgactcgaccgacgacgagatcgcgaccgtcaagcgccgagtcgccgacggcgagatcgcagtatcgacacctgtttcgtcgagcgtgccaagcgttcttccggtggccagcacagcgtccgagcccgcgaaggaccgcagcccgtcgcctgtgcccgtggtcctggaccggaagtggcgcaagacgacggccgtcccgattcggacgtccgtcgttccgccctcaggatgggcaccgtcgcagcggtacggtcagacacccgtcgtcgctttcgaacgggacctcggctggcctgccgcttccacgtcagcatcagccccgcagccgcagtacgtctcgcgcatgccgccggcctggcagcagcctgcaccacatcttccggtccgtcaacactacccagccccgcctccgacggcgtcgttcgtccggcgcgagagacactccgagccgtaccgcccgccggtgcgactgcctgccccgactcgcaccgtcaatgtaagtcaggcaaagcgctttggcctctcaacgacggcggcgtgcaacgactcaccgacggccgactcgcttgcgctgccgatgctcaacccgccacccgtcaagcaccccgtcccgcagcgcatgctcggctttccgctcgacaacagcttcctaccgccgccgacaacgacagcagcggaaggagcctcactctggcaagcgcggtcgcagcagccggccagggggctaacaacacctccaccgacgactctcgcgcattcgccgtcctcgtcggcggcaggcgacggtgagtcagactatccaacccccctccgctgtgcgtccccttttcgaccctctgcacttgccagtcgcaccaactgacgagatgcccttctcggtcggctgcagcaccgccggcctcttatttccctctcgacgacccttcgggctggtcgtatgtgcctcgtcaacatgtcgcccccgtctcatcttcgcgctgatcgccccccgccccctttctcctccaaatgcgcaggacgattaccgaagccgacctccacgccgccttctttgtccacctgcccgagccgccgccgccaccaccccagcgcactcacccgtcctctgccggctcgtcggcgcacgcggtcgagggcgcctccttgccgctcccttcaggccatgcgcacccgcgcagctacctccgctcaaataaccctggcaggtcaacgagaccgctgccgccgctccctccgctggcgggcaaacagtgccacaccgcttcagccaccgattacgaagacgaaggcgacattgtggacggctacgactgccagacgacgctcgccgtcggctacgggccggcgtacgcctgcgcaatgggcactgcctaccctcttgcctaaggcggccgctcgtcaaggaccgccttctcctcgacgaacccgagccctcgccttcgctcacgccaaagtcggatcggccctgctcgtccgacaacgacttctctcgctccttcgcatccgcgattctaaaagccctcctcgcctttgatcctataggcacagccatcgtctctgtccgaacccccgcccacgcccgctgtcggccggccatcccgacctgagaagtccttgacgaacgcttccacgtctcgcttccatcctatgccctgcgttcccctcttcctctggtctcttctcgctcaaaaagctcttttctgctcgcttgttttcacacgtccgtggtcgttcgtctctcacgaccccctccctctgtccgattaaagcttcgatcacggtccatcgtcgttctgttccattcgagctccaactcctcactccgtcttctttcaccattttcaaacctagaaggtcaaccaaccgcccgccccgtccccctacctgtccgttaacgacacacttctccctccccacctccactgtctcaaatctcgagccccttcgcttctcaagtggtgctcatcttgcacaggtcgcccgagcgaagtgttgtgccgtctgtgacttggctccggatccacgctcgagccgagtcgaaagggatcataagaggagagaaagaagaagtacaagaggcgagcccgaaggcacgcagtgagcgggcggggcgatcgtgcgcgagaggccgcaccagcaacaccctagacatgatgagacgcctcaccggccagcgccggcagcggtgagggcctctgcgcgaacggcggcacctctccggccgcggacgttgcccatgaggacgccgcccttccacgtccgcctgatctggtcgaggtcccagtcgatctcgagctcgcttcccttgacgaccttgccaaggtcggcgagcgacttgccaggcgtgtagacaaacatccggtcgtccttggacgagtcgggcgctggccggtcaaagatgccctggccgggcagcgtcggcccggcctcgcccccgccgccggggttcgacgcgtgatgccgggccttcttggacgaaggcccgccggccgatgacgcgaacgagaagaggttggcggcgagggaattcttcgacagcgaaggatggttgaggatcgagagcgaaagggcggccgagggcgcaaagatctcgtctgagaggatcgagagcgggccgcgcgatccgtcgccttgctcgccattgggcccgccgccgccgccgctcgttggaccagcgatgccattagagcctgacgggccgccggccgagggcaggccgccaggtgtggaagaccggtacgagggaccgcgcgcgtgtcgcgactggcggagggaacggctcgcggcgccgttggtgcccgatgaggacggcgtgccgacggcgttggcgagcgtcgacggaagctggaggagggggccggcggggatggccgggaacgcatgtgagtctgaatggaaaggacgacggcggggtcagcgtcgtcggccgtcagtcgaggcggatgcggccctgcgcggcagttcggctcgccgcggcccggcgagcgcgcaggctccgaggaagcccagctgggcagagccctcgcaaggactcaccgacgacgtcgagcgcgtctcgctcctcgcgacagcgcttccggcgctcctcgatccggtcgagcaacgtcgccttgacgccgttccgggccttgacgtactcgtgctcgagctgctccttctcgagctcatgctggcgctcgcacgactgctgacggtagtcggcgtgcatctcggcttgcgaaaggagtgcgtcccgctcgagcgtaagcgtgtagagcgagagcagatacgactgcgaggttggcgggagcggaaggagcgacgacgctagctgcgagagcgagtggtgggtgtcgatgtacatcctgcataggcaaacggtggttgagccaaggagggaggcggaagaacgcgaaggtggtcagcccagcccggcacctcaagcctcgccgacgcttggggcgttccttctgcgacaggccctctgacagtctaccgaggacacgaaccgcaggagaaggagggtgcgacgcacgtatcccggttctcgagccggtcgagatgcttgacctggaccttctcgacccactcgcgccgcttcttgtcgcgcttcgactcgcccgggatgacctcgagcggcggacggttgtgggccgacatgcttgctggccacgtgcaggagattcgggagctggaaggtagggagggacaagagagcgtggagctggctggctagcagggtgcgaaggaggccgcgctcgcgtaggtctctgttgcgggctgagcctctcggcatcaggctcgacgggtgcgccaggcttgagtaacgttggcctggcaaccgctggtccgggcatgctccctccttcgagatactgcgtccgcggcagaggccagcgataggcgatggaacggtagcatacgaggaggcttgtcgaggaaaagaagaggccgtaaccgaagagaagagggagaccgtcgccggaacgggcgggatccagccggctgacgcgtcgccgccgccgcggtgagccaaggccatccatccatctccatcgccgcccggcttccctcaaccacatcccacctcatcacctccctcagaaccctctacatccatccacaaacatgggtctcgcggcaaagatggctcaggctcaggccaaccagcagcagcagcagccacagcagcagcagcagggcagctttgcgcctcccggctacccctccggcggtggccacgcacctccgccgggcgcccccgggctcgactcgaagcagcaggcctactacccgcctccgggcgcacctcctcagagcggcggttcgggctaccctcagcagcagcagtaccaacagcagcagcctcagcagcagtaccagcagcagcagcagccgcagcagtcgacgtttgacccacgccagatcgagtcggtcctccagcaggcggttgccgatcagtcgctctctggcttctatccgccaggctcgcttgggccgatcgctcagcgggtcgcagctagcggagcgctcgacaccgtcatgcgcctttacaagctcgagaaggagaatgcgatcaacattgtgcgtccccttctctggcaaggcggggccgaaagcgaacttgaccgtctcagatcgctgactgaccgatgatccggcccgctctttcttcctatcgacaggccaagctcgccctgttcgatacggccctcctgctcgacgactcgggctcgatggccttctccaagtggaacggcgagcggctcgacgacctcaacgtgcgcccttctctctgtcgactgcgtcatcgaccccgacgcatcagctgattctgcgtctgcggcctctcctcagctcatcctgtcacgcgtcgcgacgacgacagcgctctttgacgacgacggcatctctgtgcgtagtaaatgcgccgtctgcgcggtgcaccgaggctgaccgcccgatcacccctggcctcatccgacaggtccgcttcctgaactctgagcgtgcaggcaatggtagtgcgctctccaggtgtggtctagatttttagatggaccgctgaccaattcttcctcgccacgtccgtcctcgccacctttcacgagtagtcaagaacgagcaggacgcgatgaacctccttcaaggcatggagtacaagtaccagacgccgcttggcggcgccctctcgtacgaccagcacagcgtcatggttatcagtggaggagacggctgatacgcccgattgccttgaccctcgacggccatgaccccctacagaaagaagatcctcgagccgatgctgcttggccctgccgagaccggccggctccagaagccgctactcgtcatcataatcgtgcgtcgatcggcctgagatgagccctggcaccctgtacggctgctgaccactaagtcccctctacgcagaccgacggcgcgccttccgacggcgacctcgtacgttgctcatttgcctcgcttgactggacgacccttggctcgcctactgacttcctccgtcgcccgcttccggcactcagatcatccgcgtcatcaaggatgccaacaaccggctcaagcggacccgctacgggcccgacgctctgtcgatttctattgcccaagttggtaccgatcttgaggctcagtcattcttgggcgagattgacgaggaccggacgatcggcgacctcgtcgactgcacgagcggctacgagctcgagagcgaggagatccggcgaaagaccggcaagcagtgcgtcggggtcgcactaccgagctgtctgagaccggacgctgacattctcgtgctctcttgctcaggttctcgcccgaggactggctcatcaagctcctgatgggtgcgcagccgctctttcccttttcagtcgagccacccactgacctgcttcgccatcctttgctcgcccgcaggctcggttgactcgagctacgaccacgctgacgagagcgccaagaagggcggcggcctctttggctcctcgggcggtggcgcctcgagctcgggcgacaagaagaagggcggtttccgctcgctctttggcaagaagtaggcggcgggttgcgtgttcagtctgacggcggcgggacatggtgtacactggcaggggcgggtttgctactcatgaccatctcatgcagtcgatcggccgagaggtcggcatgatacgcggtaggcggctcgacgccacggaaaggtcgtttcgccagcacatgcgccgagccggcctcgcaaagcgcctgcgcagttcgtcctgcggctcatgggctcctctctggcgtctaccgacggttaagggaccccgtatcagcccagcgaggagcgggctgcatgtctggctgcatcgtcgggtctgtccgcatcgagtgccttgatgtacatcatgtgatccggggcgagcaaaggtagtgcgtgctgcgagcaggaagaggcgaggtccgagacaatgcgcgggcagagaggaagatgacgagagagagagagggaagacggctgccgagccgccggaggttgcaggcaggtgcgacgcgcggagacgttcgtgagggagggcaaaggatatgggcgagaagggggtcgtaagggagcgggaaccaaagtacaagtagctgagagtgttctgtgggcggcggtggaaaagtcgtgaggcggcagagatagggcgaccggacgcaagaatgaacatcgtccgcatcagtgctgcacgccgtagtcgtcgttgtagctcttggtcacgctcgtaaactcgccgaacggattgtgctcggtcgcgagcgtcgcagagccgtcgccgaggacgggcgacgggaaacctggcgtcccagggctgacggggtggccggcgacgccgcgaatgagctgcgactgagagaggcagaccgacagagaccaggtcagcttcctagaggcgggaagacgtcatgtcgagagacgtaccgagacgactgagccgtggtcgtcaaagtcgagcgacttgctgtcgcgcaggtggcgaaagttaacggcgtcgacgccgttggatgaagcaggcacgatctgagcgagacgagcggatgtcagcgggccggtcgagcgtcgcttaacccggcacacgagcacttacgggcggcgtcgtgttgcgcagaaggccccaattgatgacgccaaaccacttgtgcgccttgacctcgctcgcgcccgactgcgagccgagccggcggttctcctccttccacagtagcttgcggatggccgacttgcagttgctgcaggagcgatcaggaaaaagccgccttcagtcggcgtctgcggtcgagaagcagcgagagtggcaggacgaacgcagaaaccgctgggtgctccgggaaggtaacctcgtgcttaagaacgttggcgaaggttccgttgcggttcgggcccttgaacggcgtcgtcgcgaactgacagcaatcgaaggtgggagagtcagggcaagcgcaaggcgtccgcgtctgagagcgactaacaatcatctcgtaaacgaggatgccgagcgtccaccagtcgacggctgacgtgtggcccgtgcccttgatgacctcgggcgcgatgtactctgcgcgggcgacaagacaggtcagtgagggctgaagggtcgcacgatcgcaaccgttggctcaccttctgtgccgacgaacgagtttgtccggaagtcagcgatgcaagatcgcgtgtcaaccatcggcagctgaagcgagcgagtgaggtcagcgacaggcagacaccgagactaggggccagacgaaacgcacccctgtcgatgcgctcgtcctgattagggccggcgcaccgcccggctcgcccgactgttttgagagatcaaagtcggagagcatgatgtggcccgattggtggaggaggatgtctgcggcggggcgggtgtgactatcagcagcgcagcggacagcctgaagaagtgaaggccggagggaagtacgtactttcgggcttgaggtcgcggtaaatatagcccatcaggtgaaggtactcgagcgccgagacgacctcggctgcgtagaagcgggcgtcctcctcgggcaggcacttgcccggccgggtttggagcgcgcggaagaactcgccgcccatgcagaactccatgcaaaagaagagaaagtcgtccgactggaacgagtggaagagcgtgacgatgaacgggtggttggacgtcgcgagaatctcctgctcggcgagcgcgcgcttgatcttgttgcgcttgatcatctctttcttgctgaggaccttcatcgcaaacagcttctccgtcttcttctcgcggacgaggtaaaccttaccgacgtcgcccttgccaagaagcttgatcttttggaatgagctcggcccgacctcaacctgaggcgggacgcacaaaggggatcagcttgcggcgcgactgctgaaccgtctgcaggcaggacgtgcctcgcgcagcttgatcgagttgctggagtacgtccgcttgaagttcttggtcggtggctggatgctcgccccgatcgagttgctctggctcaacatcttgctgctaccgaggccgaggaccccgagcgtgcgcccgccaccgctcttcttgctgcccgaggccgatcgcgtcgacgactcggtgtcggaggagagcgagacgacagtctcgtgcggctgaacgcccggggacaatgcgtgcgcgtcgctgccgttcgacgagctgaagaagcccgctttggccgtcgacggcgacggcggagcgttcttgaacgagagggccgagccaaagagcttcgtgttgggcgcggaggccactcgccgaagccagcgggtcgtcgctgaccccccgtgcagcgtcggctgcgacgtctcggttgccgggctcgtctcgctcgaaggggatgcagccgatagcggcgacggcgtcgagacgagccggagctgcgaggtgctgccctcgggcgccgagccgttcggggccgtcaggaacgacatcgggctctttttgccgagcgacttgtagcgttccgacttgccggacggagcggcagagagggtggggtggtgcggcgacgaggacgagcgcgccgggctcgcgcgagggcgggcagctccggaggaggtggcgaggttcgccgacgagtcgttatcgtcggagccaggaccgtcaaaggagccgagtgatagtggcggggtagccaaggaggagggctcgtcgtagatcgagccaccggcgccgctcgagctacccccgccggtgctgctgaccgaccggaagggcgcgagcgatggagcgaggccgtcggccggatgctcgtcatgcgagtgctgccgccagcggccgtcgtcgccgaacgaattgtcgacgctcgtcggtccgctcgggattgagctcttgtacgagccgctgccagtcgtctgggcgtgctgaggagtcgccgtcgactctggcgtgaaggacgacgtttccgacaagcccgaggacgtccttgccttcgagccgaatcggaacatcttagtccacttctgcgacgaaggcgaggaggctggtgtgtgaggggatgaggagctggcgctggctgtcgagggcgacatcgcgagcggaagagagggcaacctcgtgatgggtcggacgtgaggtgccgaggaaggagaggggatgggcgaagccgacgcgcgagggtcgatgagaaggcgtaggggccgatcggtcgtctagaagcgggtttgatgagctgctagcctggtcgagagaagcgggtcgggtcgccgtacagcctctttgagcacgtccagggtcggggggaacaaaggggaggggccaagatgtcgttcacgctcggagggaagaaagacgggggctgcaggcagccgtccttccccgcgcgctagcctcgcacactacacacgagcaaggacgcgttcgatcgcagtcgtcggcaggcatcgcaaagcaggtcgtggacagtatttgcaggagagactcatgcacatcacaggttaacgtggaccgagaggcccggcgcggagatcgtctccatgtgctcctgcgggcgagaagagagagacgtcaggtcagcctctcgcaaaggaagcggcgaacgagatttacgcaccctgatccacttctcgcgctcctctgagacatggtcccagacctggtaccggcggtcctgctgcaaagaggcagaggaaggcgctggtcagcaccgagaaggccgctcgaggcagggctaccaagggggctcacgcgcaagacgctctcgacctccctcatgtcgatctggctggccatgtccttgagactagccttgcccccgccctcgtcgccctcgtcgcccgagtcgtcgtctgcatcctccatgccgaacccctttgtgcgctcgcgcttctcggcctttttctggccggcccagaagatgaagaaggcgttctccttgaggagctcaaagaaggcccgccgggcgccgtcattttgctcgcgctgccagcgctcgtactcgtcctcgagcgcgtcaggcgcgaggtgcatccgtcggacggccgcgtcgtcggcaaccttcgcatggacgtcggcgaaccgcgtcgccagcgaatcagtgttggcagcaaaggcggcgtggagcgcggcgagccgtttccgcgtcaggtgggctaagtgggcgccaaatagctggtgcttgtcgccgagcgaaagagcctgcgagcggaaccgcggatccctctcgagcagaggcaagcagtcctcccagcgagcctgcggtgcggggagcaggtcagcttggccaaaggcaaaaggcaaaagcggggaacaaaggcggctcacatcgtgctcgtgcaccttgtcgacgagcagcgtcccaaattcgcgctcggcctcctcgcggccgacgagccccctcgagcgctggacgtcctgaccgaccttgcgctgctgcgcgcggatctgctcctcgcgctcgcgcaggctggccgccgcgcgctccttcttctcgcgagccttgcggaccgcaggatcctcggccggctcgctcggagcccctgccatcgagggctcagcgcccgaggagccgttgcgagcgaggaacttctcaaacagctcctcgcgctgcgaagaggagccaacagcgtcgtaccgagggtccttctcgagagtgatcttgacctgcagaatgagaggacagggtaggtcagccgttcctttcgcgcgcaagatagacagcctggacgacgcacgtcgcgccacctcgagtcggctgtgatgccagaagcctccttcagaagcgcgaggaaggcgtcctcagccttctttgctgccgctcgcttgcctgcgggtggggtaaagctgatcagcagcatcacaccatcgaaggggctccatcgacgacgcaccttcgccgagctcgcgcagccacgacttgaaggccttctcgcgctcgcggtcgtcgcggccaaagccaaagaagcgccggtccttcttccaggccttgcggaagtcgtcgaaacgcatgcgcgtgctcttgacctcctgcttgaggagcgcccggtagtcgtcctctggcgagcgggagctcgcgccggccttgccgttcgacgcggcggcctgctgctttgcctggcggagctcacgcgccttgtcgcggcagtactcttcaaagacctcttgccggtccgacatggccgagagcaggatgtagcgcgggtcgttgatgaagagcgggagcgaaaagtcccagggcgcgacgggcgaaatgttcttctcgtacaggagcgactgaggaaagcttctaagtcagcgaagagtgcttccggagacgtcgagcagcacggaacgcaccttgaacagcgccttgccctcgtcgagcgtgatctcgacccggccgccgacgggcgcctggccgaagacgcttcggcccgcctcctcgcgcacgcgggccttctcctcggcctccttgcgcttctcctcagccttgtcgcgcttctcctgggcctcgcggtcctcaggcgagacgtactcgatgcccatctcggccgcaatttgccgttgccaggcctcctcctcctcggggcccgaaggaccaaggttgccgtcagcctcttcgtcgttgtcggccatcggctcgccgtgcgaaggtgatggaggattgtgcagcgcagagagcgcgtcaatgtcgagctcgtcatccggcgcgggctcctcctgcttcattggcgctgccgcggctggcggcggccgcgactcaatcttgggtcgctgggccgctttcatcgccgccggggccgttgggacgggcgcctgcttgcgcttcttggacgccgccgcagcggccgctgcctgggttgccttggcctcggcgatctcggctcgcaggcgctccagctctgcctttgccgacgccgcctcctcggcgacgcgcgcgtcctcggcggcctgctcctgcgctacgagcgctgcgacctcagactggagggtcgagttgtcggtcagccctcagagtttgcgacttgcagactgcgagtagacacaccttgatctcatccggcacagtccagacgctctccttggttgccttgttcatgtagaaggtgttgccttcgctcgtccggacgcggacccagctcgtgccttcgatcggcgtcttgtcctttgccttttccttcttcttcttcttctccttgacctcggcagccggcggcgctgaggacgtcgacgcggggaaagcagggtagcccggcggcgggacagagaagttgggcggagggaaggcgatggccgacggccgctggtaggtcgattggcctgaggcggcgtgataccagtagggcgtgccacccatggctgcagtcaaggttggagagcgtcgtcgtcagacagctgcggcagatcggcgagggacggcatggcacccactatgatgctcggtccagccgagaggcagaggcggcatgccgcccggcacgaacggcggcccgccagctgaaggcggaggcaagaagccggcagggaggccaacagggcctgccggagctggcgggatttcgggtgcagcaggagcaccttccggcgcatcagccggcggggccctggggagagaaacgaaggagctgcgggtcagccttcgagctggcggccggacgagcgcgcagagatgcagggccgggaggttgctcacggagggctcgccggtgatggctccgcgggtgctgacggcagtgctgcaagaggaggcgaagccgacatgacttctgagcgtcgctggggtcgtccgaaagagaaagaggaaaccgggccggatttgaaggtggtcgtctgaagggacgttgcgacgagcttcgtctccgccggtgtgttcgagcacgagtctgcgccgccaacggtgacctccccttcttcagctttcgccaccttctccatcttcacagctgcagagcactcatcgccccctaggtcgtagacgtcactcgcagaccgtccaaacctgacgatgaagcttgccctactcccaccgagcgtgctccttgccgcgctcctcgtgcccctctcggccgtcggccagtcgtcctctgccgcagcctcttcctcctcggctgcccctcagaactcgggctcgtcggacaacaccagcccgtcggcaagcggctctggcggagaccggaattcgtcggtcgcgccggtcgtgaagatctcgacgagcttctcggttcgttcttccaccttcgcttggcgtggcgcgtgctgttgctgcgcctcggcctcttcgccctcctgatgttgaccgtctctgcctctcatcgcaggaggtccagggcatctcgacgagtaacggcatccggatcccgttcacgacttccgtcccgttcaacgtcactatcacggcgagcaccccggtacgtggcattcctcctgcgtaacctcgcgcgagcgcaaggccccccccgcctgtcatcgccccatcgcgcctttgtcctgactacttctttcttcttcgtctcccgcctgctgtcttcatccctcaggccgcaagcggaggttcctcaggctcgtcctcatcgacaccgcgaacggcgccaaccgcctccgcgaccggccaagccggttcaaacccaaccatcaccgcgccgagcccaggccagagtggtgctgggccaaacgactcgtaccatgccggcggtcacggtcggagggaccagctgaatggagcggccgtcgtcgctgtcggtctgggtgcgcttggcgcttggtggggagcggccttctaggcggatgacgctctgctctcacccaccaccgtctcgctgctcgggcggaccgtcactcgccctcggctcgtcaaccatcccttctagcgataactgtgcccgaccctgcttgctgcaccacgtacctcatggactctttcttgccaacgactttctccctctcgccctcgccaaccgatacctagactctcctcctcctcagcccgccttgcgctccgggactctatctgcctcgctctgccttatgacctgccgagttgagcgcacgtcgtccaggaagccttccccaagcggagagcgatgctgcgctcggaatctggcctgcctgcgaggagggccagtttcgcaagaccgtcgcagcgcgcgcgcgcgaaggtcgtcggccagcagggccgtccctccgaccagaccctcctctcccttactccctccctttcgtccgtcgctctctctctcaggaaaatgtcgctgtcgacagtgcgcccgctcctgccgaccccggcaggcttctcgcacgcccaccggatctacgtcaaggcgtgcgtcgtccgctttgccctcctcgctccccgggccgccgggcagcccatctctgcacgcgggctgattggatcctgcctctcgtcgctctcgccgtcgcttcgtcccctttcgaccctgcaggctgttcaagcgggcatgcctcgatgccaaagcgacgcacgtacgtcgttccacgacttgcactgctttggccgcctctgggcccaggcgggacaaagggcagagaggaggacgccggctgacggcccgacccttcgactttccctcgtcgagaacagtacgacacccgcatgcagtggttcgtccttcgtttccttgtaccggatgagagcagtggctgatcgcacgcccttcgtgttttcctccaggcgacgcaaggtctacgagattcgcgaggagtttgactcggccaagtacgtagcccgttcttcctctcgccgtcgagctccctccttccgactggtatcgggtcagggtggcgccacgcagctcctcgcttcacctctgctaaagtgggctcagaagccgggtgctgggtggcgttcagctcctggtctgatcaggcaagttggatgcggcgcgagcgaggcagctggctcgttcgaggtcgcgcgggcgagctccctctcgctctacctcttcaagggggacactcccgcctcaggctgggcctccagagcttggcctgagcgaacggtctctcccagatgggagaactttgcttgccgcgttgcccaggccggatgaggcggcgctatccagcagaccaaccctcgggccgaagaaccctcactgaccgctcttgcctctccacgcctgcctgtcgctcctcgttttggcccttcctctcctacccggccttcgcctccgccctcgacagggacctcgccgacccgcgggcaatcggcgcctggatcaagaactacgagcgcgacctgaccgataactaccaccacgacccgatcatctaccgttcgtcgttcccctcgtcgcgctgagcgcttgctcgagactgacccgagctgtgaccccgcgctgtgtgcagccaagatgcccggtggtgtgctctagtgcgtcggcgagactcttcatgcggtcagggccgcccagcgactgaccgtcctgcttgcttccctttgcaccctcagcgagcgtaacacgcctccgccagagttccaggaggaggactggatcgctggtgacgcctacctcgagtcgcagaaggtgcgagagacgcgctgtgctgtgtctgctctggcgttgataactgaccccactgtctcgtccctttacccccagctctcgcccgaacgttcgcgggccgatcacgagaccgagaaggcctttgagcgcatgctcgaggactacaaggtccagcgctcagtctacctcgacgacgttgccgcgctcgagcacgcccgcgaggactgggaggaggacgccgaggcgagccacatcatccgcggtggctcggcgacgacgtggcgggccgaggcggcccgggcgggcgaccactttgacctccggccgtggaaggaggctgtcgagcgcatgcgcaagtttgagacgctcgaggctgaggtcatgaaggcaaccgaggcacgcgaggccaagatgcgtgcgtctaccacctgctctgccccccatcgtctctctcattcactgaccgacgtgcctctgaccttgcagtccaagacgctctcggtcactgaggcggctcccgtccctccgcccggcccgaccctctagagtctctcggtcttcgtccccatcttccttccctctcgttcgtgtcgacaaccgcgctcggcgcccgtacataatcgcacccaaaatggcgcgttcctgtcgctttaacaatggcgcgtctgcgggactttgaccgacgacggacggcgagtatatgtgcctcgggcggtggtgggtggtgcacttgtctgaccagcagacagtctaacggaggtcaggagacgcatggtacatggaggaggactcagggcgtccgagggcgcccgaagagagggcgatgagccgcatcgggcgagggaaggggcatcgctcgaccaggctcgggatcgtgtgcggcgctgaagtcgtcaaccgaccgggtcgcggcgtgcgagggagctcctctgatcttcagcggagtgcgtcgagcgggcgggcgaggcaggggcctttgggctgggcggcggcgatctcgacgaggtcgaactggcaaggggtccgtacgaagcagacgaggtcagcccacggagcggtttctgcctcttcacagaggatcgcgccgcacgtcaccaaggtcgacgacggcggggttgtcttatgggccgcctgggttgtgagcttcaggacgggagctagattgcgaagggggcgagatgccggtcgagaggacggcgagagatgaggtcaggacgagttgacagctgcgcggcgtcggagggacaagtggggaacaggggtgatgacgacgaacccttgccgccggctgacttgcgggcggtcgttgacttgacacgggccattgtggctaatgctttgtgttgtgaaggagagtagtagggctggctgctcggctgttgtccacgtacgagctcatgaaccgggattcaggtgagtctctgg
